United States Patent Application Publication US 2026/0265781 A1 - sequence listing, part 2

SEQ ID NO: 22 - DNA, 26290500 bp, synthetic construct (residues 2,190,876-4,381,750 of 26,290,500)
  source 1..26290500: mol_type = other DNA; note = Hot spot 1 - Chr 3 contig ref|NW_020822499.1 from Cricetulus griseus
gtggggtacagaactaaatagacaattaacaattgaggaatctaaaatggctgaaagacacataagaaagtgttcaacacccttagccatcagggaaatgtgaatcaaaacaactcttagataccatcttactcttgttagaatggctaaaataaaaaacaccaatgatagtttatgctggagaggatgtgagaaaggggaacactcttccactgctggtgggagtgccagctgtacagccactttggaaatcagtatggtgactcctcaggaaaatgggaatcagtctaccacaagatacagcaatccactcttaggcatatacccaaaagaagcacattcatacaacaaggacatccattcaactatgttcatagcagcactatttgtaatagccagaacctggaagcaacctggatgcccctccactgaaggatggatagaaaaaatgtggtacaactacacaatggagtactactcagcagaaaaaaacaatgaaatcttaaaatttgcaggaaaatggatggaactagaagaaaccattctgagagaggtaacccaatcacaaaaacacaaacgtggtatgtactcacttatatgtggattttaggcatagagcaaaggattaccagcctgcaatccaccctgccagaaaagctagtaaacaaggtggaccctaagagagacatacattgtgccctggagaatgagaaagggacaagatctcctgagcaaattgggagcactcaaagaggggggagggagctaggagaatgagaaggggagaagaggaggagtgtggagggacatgggggagcagaaaggttgagttgggggaagaataaaggaaaacaagaaaggagataccgtaatagagggagacattttaggtttacagagaaatcaggcactgtctggagatctacaaagaggacaccaactaataatctaagcaacagaggagaggctaccttaaatgccctcccctgataatgagattgatgagtaacttatatgccacccaatagccctcatgcagcaactggtggaagtagaagccgacacccacaactaatcattgaactaagctggaatccagttgcagataagaacgagtgataagcaaaggggtccagaccaggctggtgaaacccacagaaacagctgacctgaacaacgggaagctcttggtccccagactgatagctgggataccagcaagggactgatccagaccccaggaacatgaggtttcaatgaggagacctcggaaatctaccggacctcctgtagtagttcagtagttattcctagcataggtgtggactttgggagcccaatccacatggctggatactccctgagccaagatacatgggcgtggcctaggccctaccccaaaagatataatagactctgatgcccccccccctatggaaggcctcaccctccctggggagcagaaaggatatgtgataggtagggttttagtgggggggaggggttggttagggataaggggagagagaaagaagtaggattgacgtgtaaaacaatcttgtttctaattcaaataaaaaaattgaaaaaaagaaaaccctaatgtagagtgtaataccagaagtgcttgtagagaagcagaattttaagaataagtttctctaatggtcttggtagcatcaggaacaagctctccaattgatgaacctaaagttgctaaagactctcctgctagtttagagatcactgataacctgtctcaatttaaagaactatgcaaaggccagagagatggctcagaggctaagatccctggctgctccttccagaggttctgagttcaattcccagcaacctcattgtggttcacaaccatctgtaatgagagctggtgccctcttttggtttgcaggcatacattcagacagaacactatatacataataaacaatcaatctttaaagaactatgctccttgtgcatcctttaaggaacaaggagtttagtggcttcctgtataaaacctttgtggtacaagacagaactgtgtggttccaagcagcctcaagaacccatgcaaagttctattttctctattatctctgtcataagacacttgtgcctgggtagtctgctagtataaaatgaaacctgctgaatagaaacagggccccctttctcagatccactccagatcattacaattgatctgaagattcaagacaaataaaataccttattattttagttcactgaaatttgagggtagtttttttcccacagcaatagccacttgatacaacccaaaatgtggtgttctcaaattttaatatagataaattgattatcctgtttgagatcaaaatttccagaaacatgtactaaaataagtaagtgaataattaaacaagttcccccagggcagcaggtagggggccaaggggaagaaaactggaaagggaaagggagcattacttgtagtagatactgttggtgaccattactcagggatctccaagaacaggatctcctcgtgtgtgtgtgtgtgtgtgtgtgtgtgtgtgtgtgtgtgtgtgtgtgtgtgtgtgtgtgtgtgtgtgtgtgcatgcatgtacatatatgtattgatataattttaaggatttgactcagaaggtcataagcacacaagtccacagtcttcagggcagaccaacaaggtaggtatccagagaaaaccaactgctccagtcttccagtctgaagccaggtctgaggaagaagatctcatcttcccttagaggctcttgtcttctattttatgggctctaagtggttaaattttcctatccatgctatgaagggaaatacactcagactccatcgaattaatgttaatggcgtttgaaagagccatcctagtgatgccagaatgacatttgaccaaacatctggacatcataacctagccaaactgacatagaaaattagtcatcccagtggcccattaaatgctagctgctgtacaagtgtattctatgccaatctaatggcctctgtctaatgggagcagtcttaagcagtaaagcataccccagtgtactctcctcccaacctcctcgaaaccagtcagtgaggcctgcagtgttagccatcttttatagatccctcacagagcccaagctgaagcaaatcttgcaccgcaaccactcattctcagagaattttctcagcaaatcacttgactaagaatctttgcaccagcctctcttctaataaatattacagacaaagctacatggacatactagttggaagtcacaaagccaggttaattaaagttcagaggtgatacagaaataatgggattattattttttttgttttgcagtttcatgcctaagtcttgtgtatttccatatttatcacattttgtttctgcagctaacaattgcatgtctatgtatagtaagtcatttgccagagtaaattgtcaacattcagagtaaatagttgtttatcagcttgccattactgtggcaaaatacttgagataatcaccttaatgagggaagtatttactttggctcactgtcctgaaatttttagctcataacgattaagccctgtggctttgagcttttattagtgtaatatactgggacaagaggaagaggcagatgactgtttatactatggcagctagaacttgagagcaggagggaacaagggtcccaatacccccttgaagggcacgtgcctagtgagctaactttcttccactaagccccaccttctatttgttcccagtagagcacaggatgcttaccaagtctctaatacatgatgattcaggatacattcgaggttcaagctgtagcaatggtaaaggaaccttatttgtacataaaaaaatgaaagtaaggctatatgaaggtctcattctttaaacctggaaaatatatgttggctctttatggaggatttatgccttgccaagagctctgtttttaaacaagaatatgacaggttgtaatccctacatttgcatttaactccaaattatgtgcttcttcagttatgtgtgtcaaacgcaagccgacctccctgctcagtgagcaaaggaatcactatattcaacatgaggtactccaataggaacctgatatgggaaagaagttcctcgggtattcattcattgcttcacagggtacacattcaatgaccgttttccttttggtggttgctgtgctggaagctggataaagtcatagagggaagaggtgtagcgtcggtacagaaaacagtagtgatggggaagacctggggtcactgacttcctgcaaaataagacatgtaagctgagctctaaaataatcaaaaggctgatgataacaggagccaggggagaggctgatgggtggaagaacacagtcagaagtgaaatagagggaactgcagtaattagccttcaagacaagctggagtgcttcttcagaagaactgcaactcatgggagaagcagtggcttctatttcctatggcttgttctagaaggctctgagaatcactttattctcagtatcagctttctgagagtgacagagatttggttctcacaaacatggcatgtcctgctcgtgactgcctctcctatagtgagtggaagttatatataatataccttttgatgctcctgttgatccctgtggagactgctaatttttccaggatcttagaaagcatctcttggggaagtaaatgtcataaagcaaagtagagggacttgcaaacttaagtggagcttgtatatttcaacctggaaatatagttgagagatgagaaattcagatgagcaggaagcacaatattggctacaagaggtgcttcaaaaacagtattggaccgaaccaagccctctgaatgtgggtgccagctaggaggccaagacagtcgatgggacctctaacagtggagccagtgtttatccctagagcacaaatggactttgggagcccattccctatggagggatactattgcagcccagatacagcaaggagggcctacgtcctcccccaaatgatatgaaggactttgaaggtcccctgtgaagggcctcactatccctggggaggagttgggggatgggttgggggggttggggaggaacatgggaggatgggagggtgagagaatgggggatggttatgtaaatatgagtagttattaaagaatttaagggctggagagatggctcagaggttaagagcactgactgctcttccagaagtcctgagttcaattcccagcaaccacatggtggctcacaaccatctgttatgagatctggtgtcctcttctggtgtgcagatatacatggaagcacaatgttgtatacataataaataaataaaatctttaaaaaataaagaatttaaataaaaaagaaaaatctaaaaaaagaggtgcttcaaaacatttttcttttctcaacatgatgacatcatgctagcttcttaatgaagacagcatgatgcatgtcacaagaagagacagagatgtgccagagtgattaagagtggtttcacctacaaggtaagtaggagcacaatgtcaaagaacaaattgtagcatgggattctgtatgctgcacaaggaaataagcctggtctgaatatagacctcaaacataatgttccaaaatgtaactctgagaacaacagtattaggtgtataacccaaagggaagtgctgagtttgtaagagtggagccattcataaaaatattctctcccattttcctgccatgtgagtaacagttactcctctccactggatatttgagatagcatcatggaggtggagaaagagccctttcaagtcaccacaagtggcaaagaacttctctgcctctagaacatggaggaactaagtttctgttcttcataaactaccaagcctgtgggattttgctatagacaggcaaacagatgaaggcaaacactcagtggaagaaagaagcaatataagaaaacaagctgaagctgagttagggcaaaggttaaggaacagtgcactgggaagtatttaatggccagctcttaaattatagatgcagaatgtactcgtgaaagtttgctataaagttaactgatataaaaggttgtacccctttatatgctatgtaaacaataataaaatgaaccatcattttatagaaattctatggagacaattctcatggaatgttttgtcaatcttttgttgaactcatttctgtgtagttgccaagaacaatggaatgccatcctgacatgaatttaggttgatgttttctttgatattaacaagaacaaaagcaacagagtacagacatacatggaaaatgtggaacttcactcatttgccagtgactggagtgatttctctgtcaaactggaaaatagtttcaaatacagcgagaatattatttcaactttcatactattcagaatgcaatggctatacacacagcacctttttatgtctgtttatattatctacgtctgcttcattgcttacttaaactcagacagtcaacaaagtaataaatcaaactctggtttatagcatttgctgattttcatgctgtaaatatccccactatggcaaatttaggctttcagtttgatgcaatgaatgaagactggagaggatacatagaataggagcgcagcattatagggcattctctccacataggagcaataggcataaataactctaaggatgcagctattgcttggcatagcacaattaagtactataaaattattggaagggctaggaagatatctcagcaggtggaggtcttctccaaaaagcctgaagtgtaatgggatatttgtacagtgtgtgaaggtatattgctgtgactggtataataaaatgctgaacatccaatggctaagcatgaggtataggcagaacttccaggcagagagaagtaggcaaaggaatcaaggtgtgtgtaagagagagaaatacaatgagacatggaggaatcaggatgggcagcatatgacattacatagattaatagaaattggttgatttaagttataaaagctagttaaaaacaagcttaagctaaggccaagcttttgtaattaataagtccccatgtcattatttgagagttggcagcccaaagaaaactccaactacactgaagacctaagttcattctctgagacccacaagttatcctctggcctccatgcatgtcacacacacatgaaagaggatgtagcaaaattccgtctctgtctgtagaaaatacactgaaaaaaggtaatatcttaacccaaataaggaaatacaaccaataatacagtaattacagagttagttagtggggtggggcacaggacagcaatgctaccagactctaattatgtttacaaaacctggtgagattctccaaaatctgaccttgtcctccagccttagctcttgatgctccttccctttgacttggtatatcagtgacatcaaatattatgttgctcagcccatagaataatgttctacatccaggctctccctctgtctaaaacacactcctcatctctgtttcctccttctattattgtgtagctattctctgctcagagtcacataagtatgtgacactcctaaaaaacaatttttatcccaccctaccccaaaaacagagtccaaaatgacttttgagcatccccatgaggggattattagattggcctttcctagaccactgtattgaaatattccttttttaagattaataaaggcctatagtgcttctaagatgcagataaggccctttattttgtatctttgctcctagcatgttttagaacataataaatatttgttctagtgaataaattttattgttagttttgataaaacatatctctttaaggaaaagcaaataatatccctttatacaaagaagatatagatagatggattttttgtaggcagatttgtctgtgctaccatccagttcccaattcacggcatggagagttattgttaattatgaaaaatcagcacatcgcttaggcttctcccactagctcttacaacctcaatcatcccacttctgctcatctacatgttgccacatgactcacagcattaacctagcctcctggatgtctttcttcctccccttctgccttcttcccagtgttctctctgtccccaaagtcctgtgtagttattagctgttcagccttttactaaaccaatcacagtgacacgtctttacacagtgtaaaggaatattccacaacaataaaccaaaggaaataccatcaaaataaaatagcagaagaatgtgatcctctgaaggctttgcatccattctgggggaacgaaagtcattctggtgctggcttaagccaccattctgggaaaagacaagatagggaatggaatgttccactcttcttaagacagggggtttgactcatgttgaatctgtttgcagttaggataccaagcatgtaggtaaagatgggagaaagaaatgcaagatttcttgccagttgattcttcctagtcaggaaaagctgaaatgtgggtttataatgaagtcctcgagacaaagcaacttgacatatgtgtgaatgaccatttgtactagagaatggtagtaggcagagctgacaacttatatcttcagttagcagagaacagatgcaaagacaatctaagaacaaaagaataatcattggaatgagaaaagggtgaaaagatgtgtaagcttttacgacaacagggagagactgcctttcatacttatgggggtttgggaaatcttcactgtaacactaaatgaattgtgtattgatgaatgaataaatttcaacaggcaagaatgagcaaataggaaagatccaaagctctgaaaagtgtcaggagcaaaggtagaacggcacataattgctctctctgatggagagcctactgaataaatcaattggaaaagagtattagtttgacaaaacattgcttgtgaaaccttgaaagaccttagtgattcaatttcccttgctaagtgttcgctgactactttgccaataatttattctcaagtcattctcaatattcatccaaggttttctataagccaccaattccatcttctctcttgtttgtgaaggaatcagactggcccagaagtttgcaccaatttctctagttcctgaaattagaaacataaagcaaactcacttctgtcaaaaccacagactataaaatccaaactgatcacctggtgaacagcaattatacaccaaacctaaaagtacatgtctatataccctagcacttctattttagataaggaggcaaggaaactaaggaggagcagaagaggaagagcatggttagatagatgtagaaaaacacatgaccttggttgtaaactctaatccaccaaattctaaggacatacaagtaaaaattctatgtagttcacagctgaactaatgcatggaaaaatatgcaactgtggattttctaagaaaaagccctacagaaagatataccctttattgaattcaagattgatatagaagtaaatatcttaccttcctaaatgatagagttcatggcaaaccatactaatatttttctagcactataatcgcaaaagcaattagattcagtcaacagcttttggaatgaaaagagctgttttgtattaatggcagggtaatttgagcagccatgagggctgcattttagcgactgccttccacacaacagtcactgtgttctttaagatgaaaataaagtacatttcattctccctgcagcagtcactaaaaccttaaaaatacataggaatggaaataaaaagattccttatcagaattggtagcattaataaacagttaccaattaatagcatcaaaaattaatcatgcattaaccccatgtttctcaaaagatggttcattgaaaatggggtgggggattctacatatttacttctgtacaaactatgctgtgttccacatcacagcagatgggatggtgctggtggtgatatggttgtttgattcattttcttttttttcatcctttagacttgttggagaaagaaatagaaataaagttctggacactaggagggtggccataggaccagcaaataaaggatgatatcattatccatccgttcaacacatctctatgaaactctatacttgtcaagcactgtgtcagacagtacaaattaaaaggtaaatgagatatgatcattgtccatagggagtttgtgtttttgtactttgaattatcagatttttcagagtgataatacaagagagaatgtaataaatgccacagaaagacatggggagggaagattcaaggacacatgcagagaaggtggccttagtgggtaagtagccctttctggtagaagaacgagtagagagcagggagaaaaaagacatggggtttggaaatattaaggtgtgtttggaagagagagtgccagcagcaggcatcatgaaatcaaagcaaatgcctttctaattcatggctctatcctgaggcacagagaagtgcttggcctgtggggaaatacatgatgaatgaatgaatccacattttctgaagccgaaggaatacaagaaaatgaataagaaatggcagaagggctttacatatcaagccagcgactttggacattgctttacaaacaccaaaaagtctcaaacaaaaacgcttgtcttcatctataaaatacaaatgaagctgttcgtatctacttccaggtagctgttaaaatctgaaaatgataaactgtcaacaaatgcagtcttactgaaacgtatctgaggaaggctggatgtcagttgtgtaatcattgtgctggaaaggtgaacatagtcaaccaccttacagaactgggctcattgttctccttatgatcacaaagtcaccccgtgatgttgagctgggatagcccataagcagaatctggcatactttgtacaactgtgcttttgttccctccttgtcttcagagtaccacatggctgctcttcagagaggagtcctagtgttttctttcaatgtctttaagtaatgttttcttttagcaactccttaagaaatcacaccttgctcagaatggtaagtgatacaacagccatacacagcagataatgagagagcagtcattcagactactactgcctaaggcaggttcgttcatctggtttatacaacttgaggcaaggactggttgaaccagcaatagtcatgtctgaagctatcagcacatgtctgctgcttgactcaatttcagggcattccactttagtttctgagaaacaagacggggacagggctctttcatagttaacatataaagttcaaatataatggttttaattccatctgtactgagttcagtcttttatattacaaaatcagcacattgtttttcaagagggctgagtcactaacaaagcaataaacagcttgggttctagattgaactcagccacaaaactgactgcatgaccttagcaggtccttgtactctgatgccacttctcatgaggcaatatgatgagaatcctgttggtgctcacagcctatagtttctatgtcttccaatgggaaaatctgagaggagataaaaaatgatgtggtccaatttttaacctcaaagtcagctgtttccattgtcaatatgctgaaacccaaaagcctttcttaaggagatattataaggacaataactaggataagtgagttcatttgtcatagtgatgaagctgtgggaatctgtcaatcaggaacagaacactgctcacctccatgaagcagaaaaccagcagaagcagctatagtgctttggatctgcccttcaatgactaaaattattggctgcccccaacttcttctttgacatcagacaataagttttagtattaccagtctaaagttttgaaaaaaaatagagaaccaggcagatagtttttttttctcactctgcgagggctacactgatggaggatgtccttttatatgctatgaatatgtttctcttattggttgatgaataaagatgttttggccaatggataggcaggatgtagccaaacaggaagtacagatgtggctaccagactaggagaattctgagaagaggaactcagatagtgaatcaccatcgagacaccatgtagctatcaggaaggttggatgcccagacattctcctgtaagccaaaactatatggagatatgctgattaatagaagggggttaatagttagcagaggactagccagtaataagcctgagccatcagccaaacagtttataattaatagaagcctctgtgtgtttatttgggactaaacagtcacaggactgggcttgcttaaacacagtcaaataagggcagattatctgaagcttggatagttacctgaagtctagcacacagttgtatatttaccggacaccttgctttgaaggatgtattggctagctttctacagccatgaccaggatgtcaagaacatcttgaaattaggtaagattcactttggcccacagattcagaggtctcaatctgtatttggctccactgcattgggcttgaggcaaggctgagtatactaaaggtgaaggtatagaggaagagtatgttcaccatggaagaccagaaaacaaaaaagaggaggcagaaaggaatagaggacaaggtagagcctccaaaggtatgtcctagtccttgttcttcaatcaagccatactgtcaaacaatgctaccaccacccaataattctagcaaatacaactctatgaacagatcaattctttcaacaagtcagatccctctgatgcaagcttcccccaaaacccacagtggtatccaagactctagtgaatgaccctatggggatagttgcattttcaaaccataagaaaattagattaattggggccacactttgtcctccagaacctcactaacagattaggccaataactcaagctcagacaacattcttgccagttttcctagtcttcagtttggtagacaagaaaactgaggatcataaaagacatatttaccaaagacacatagtgaacaaggattaaaccagatccagggcctattcctgtgatttctatgcccttataagttggtagagatggaggctagcaccatgtctatattacttgactggctcagctcacttgacttagtatggggttttcacaaaggtacatatttagtctcattacccaaatactaaagtcagcttcagtaagatgcttcctagcttaaacatctttttttttctttctctacattttcctagtcctactccattgagaaaagcagtgctactcatccccaaatgcccaatgatattgtccaaactcccagagtctccatggactcctcccacaatctcagaggcaatgaatttcaagaacgtgtccactctatttctagtgtaattctcaagtgtgcatcccttcccaccaatgtcacctgacttagtccttttgactcaaaccattgttgctgtcccttagatggagttactgtattcttagctaccccacctagatgactctaacacctttttcctcaagcagtacctctactcagataagtccacatcacatacaatccttctgtagtatcagctactaaataaggctccaacttttccctctgcctctcaatccagccagtagggcccaacccagtctctgtaacgtcattcttcttgcccctctggagtcaatcccaacaccccttagcaaattgcttgtgactcctcctccatctctgtgttcttgtgtttcacattgtcttgaaacatattctaacctctcttctgatctaaattaaacccagctgtctcgtgttatctgagtaaacatgtccctgatctaaaagagagagagagactttccaatgaatgttaaggaacctttctagatggcctcattgcacaaataatttcagacagcttagagaagccatatttaataatcataccaagcttcctgaggaagtcggtgacataggggagcctgagaagtgagtgtcatggaggaagaatagagcacccagtagctgctgcaagatgctgtgtatacccaccagatccaagaaggaaattcactctgagtttctagacagacaaattttaaaaaggaaatatggctaagtgtatgtgttaattacttttctcattgctgtgacaaagtacctgacaagaagcaattgtatggaggaagaatttctggtttagtttgggggtgtgctgaaaagttggttgtacactagcattgaaatcctcaggtgtctgtgggtttgaacttgtatagttcaacatgctgcacaccacagcctgaacacaaatgctgtagtttacacccacatatcttttcccttaagttaaccagcctgtaccatatgatgttggtcatgaagaataggaataacagagggcctttctggagaagtactatgtagtgaataggtttcaaatgttgatcgtaacactggaccagctagcactttgattttggacatccctgaccctgtaactattcaaaagataatgtagtttaagctatgtcttccttagaactgctcatggtaaaacagacaggctgacaaaaggacagagagggccatgtacaccaaccttgccattctacagaatagaagaaccccaaagtggggatagacttacctaataggacagaaagcaacatggaaattgtctgtccattagtctttctgtccttcacacacctgtctatggcaggggaattaagaaatgttccatctcatcacatagataacatcctttaaaatgataatattttaagatgtaaaacattaacccatatttgaaggacaacatggttgatttagattatgtgaaaaaatccatttacaaaatggatttggtaaaaataatcctccaaaacaaaaacaagaataatttttgctatcatatattccttttgtttctattctcctcttatgtgactttagaatgagcagctaccagggctggaagacaactcagtgagtgaacgtgaaaacccaggctcaataccctgaatccacactaaatacgtgtttaaaaattaagtgtggtggttgtgcatgcttacaatccagtgctggacagccgagacaggtggaggtaggtccctaccagccagcatagtcttcttgacaagtttcagaacactgaacgatactgtctcaaaattagaagaaaaaggcagaggatgacactttaggatgaggatgacactgaaggttatgctctggcatgtacatacacatgcaagcatgcctcccacatgtgaacacaaacacatacagaatgagtacttcatggtgaactctaccacaatgaaacctctattctgttcatttttaagttagcatatgaagtgatgggtttatttatgacatttttcatatatatgtgtcactgtattttgttcttatttttctcccttctccgctgcatcccccttctcactctctttcaggtcctctccctcaccccagtgttctgctgattgcatgccatgtgtattcctctagcatctcctccctgcctttaaatctcttactccaaagccaggatcccctttctacttccatcacacacacacacacacacacacacacacacacacacacacacacacaccacatgtacacacaccacatgtacacacaccacatgtacacataccacatgtacacataccacatgtacacacacacacgtactacaagcacacataccatataaacacacactacatgcacacagatacatactacatgcacacacataccacatttacaccacatgcacacacacacttcatacacacacaccatataaacacacaccacatactacatgaacacacataccacatgcacacacacacacacacacacacacacacacacacacacacacacaccccacatgcacacatgcatgcatgtttaggtcctacaaatgagagaaaacatgaaagacttgcctttctaaatctggcacttcactttagtcccatccgctttcctaagatgttaggatttacttttctttccagctgaggacaagctctattgtgtaaaagcaccacattttccttacttcactgaacaccccacagacacacttgcccatctgggtttgctaccatcataggtgagaagtagaactggcctgaatgacattgacagacaaatgagtaagggaaacaaaactttattgtttactaaaatgaccgtttaattgtttggatggccaaggcgattgttggcatctcattccaaagtcattttggcttttgcctaatacataggaaaatgggcaagggagtcctgactatcatattcattatgactttttctttttcaccttccagcaaacatgattttggaagcttagtaaattgaaacttcacaccagttcagagacttctgagttaaccagacaagtaggcacagggtttaattgactctgatctgcctaagtatgttgaagacttacagttaccccaattcttcatcatctgctctcggcagggttgctaagcctctcttctctaaattggtccactcctgcctctatgcacagcagttcccaaagggaatctctgagaattcagcaccacgtggcaatgctgagaaggcttacccttgtcaaagtcaaataaccccacagctgctcctcttctcattttgactggaaattattaatgtaagaaaattatgctagcaaatatgataatcaccatcagattttattagtctttgtttgcactgctatttcaacaatgaaatattagcaactttttgggtaagttaattttatatttccaaagagtgattgctaaaattcagcaaactattaggccaaaagctggatctcatgggtgagtagaagggagacgtcccgttagaagaaagactagttttccttgagtttccagtgcctttttctgaggctgaaaagcctgtgccagtgacagaaatgaattcattagttctcatcagcaatagccttctttttcataagcttactgttctttctcagaagctaatagaacccaaagatcgcctccaaagagccttagtagtgtatccctgtttacaggagttactagaggagaaactcacacacctacaaaaaaaaaacctagacgtcaatgacccttgacaccatattaagagcacttccaggtgtggttttcccttttccccaccaggccaaagaagagcatgccattcaccaaacatataaacctctaagctagaaccaatgtctggacccttctttcccagctttgttgaggagcaacaattgcttagcctctttaaagaagttacagaatgatgagccaaaccaataatagcaatcctgtttctcactttgtcagtctctctgccaatgaaacacgaccatgtgacataactctggtctagaatacacatagaaaagtcatctaataaagtgtcatagatgattggatagttccctcttttgtttaccggtagacctccatctttcagtaaataagagaatgaaaacaaagttgctaataatgagaacatggaaggatataaaaaatgcttgagcccctgaatgtacagttgacagggtaagcatataccagtgactacttacctctaagacatggattatggatgtaaaataaacttaataaactttaataagtaaactattgaagtacactatcggaacaatttaaaactgtgacctcattttctcgggaaatcacagtaactttttgctgttgttttattggtttatctggatgttgtcaattgttttgagacagggtctctctgtgtaaccctggctggtgtgaaactccccatgcaaaccaaactggcctcaagctcgcaaagatctgccttactctgcctcccaaagcagtggattaaaggctaccacacccaacctctagtcatttttttgtctgtgaagctactcttctattcactctattgtgatagaaagaaagaatgatgtcatccaaatttgtatgtgctaaaacaaatacacaaggtagggttccagcagtttgataaattggtgaaatgttcgatttccaatattgtagctacatccaactgagtatttgtaacatttaccactatttgtgtagcatttatttctccctgcctggagagtggagggtgaatggggtggggggtatgtagggggagggggagggtgggggagaggaggaagagggagaagggattgacatgtgaaacaaccttgttcctaattacaaaaaaaagtccaaagtctcttctgaaactcaaggaactcttagaactctggtcccccataaagtcgaaaaggaaaaaaacaagttacacatttccaatataaaatagaagaaacaaatgctcccattccaaaagctatggctaaggtgttagtttagtattcaggcatctgtgctggcccatccttgaggttctgacaggatacgccctcagctgcagccactaaggacatcacctgtgcacattccttatgttcccttttaaaagggccctgcccggctctctcttctcttctcttctcttctcttctcttctcctctcctctcctctcctctcctctcctctcctctcctctcctctcctctcttctcctctcctctcctctcctcctctcctctcttttctcttctcttctcttctgccactcctgtccccagaggcttgtgtcccctctcccctatccacttttcccattcactttctacaataaaaacccctcctccacccaagcactgtctcatgacatctttctctcaagtgcagcttttttttttaaattacagcacagggacatataaaaggtcaggccaaatgaaaatggaaaccaagcagagcaaacacccttacagcttcacctcttccagttctgatacagacaacatgtgtgacctctctctttggccagctctacttcatgcctgtagcttttcccagaagttgtcccataggtccaagatccccactctcttgggtttaccattaaaataagctccttattatgaacacatgcacaaaaattagtgacatgaaataaggaaggaaatacaagatacggaaggggaattcagcaaagagaagtaccaaagaagacccagttctggaatgttggaaaatgaaaagcacaagaaacaaaataaaaagctctgtggaaactcttaccaatgaaatggatcaaggagaagccagaacatctgagcttaaaggggagaaattcggacaacccaacaagggcaaagacaaaataaggaactggcagaagagaaacaccaagcataaaggcagactcactaaaataataccagattattcaactgaaacgcaaaaatcctagaggagtcaggcatggtggtacacacttttaggcccagcaccctagtggcagagacggagttactggacagccagagctacacagagaaaccctgtctcaagaaacaagcaaataaataagtaaatggaaatttcctttgtaatgattaaaatatcttccaaagaaggcatgggaaggtataggacacattctgaaagacaacaccttccaatacagactaatacaccagcaaaactatggcataccagaagatgaagtaaaaacttgacatgatagaaacaggccaaaggaatacatgaccactaagtcagctctacaaaagatgcttgatggaatccttcagactgaagacaaaaataaacccatccatgaggtcacagaaaagaatacatgatgctagggtaaaaaaaaagggggggaacactacaaaatgaacaaaatgacagaaatcaacacacagttttcaataatatactgagttactaagatcaaacaaaagtgaagacaagacattctaaaccatgtgggataaaaggaaaacagccctaaaaggaattaattcccagcattaagaaactcagagatctcaaataaataatttagctatacattgtaaggctttgaaaaaaagaaaaaaccttcattgttttttgtttgtttttgtttgtttgttttgctgagtagtactccattgtgtaatgtaccacattttctatatccattctttggttgaagggcacctgggttgcttccaggttctggctattacaaataatgctgctatgaacatagttgagcaaatgtccttgttgtatgaatgtgtattatttgggtacatgcctaagagtggagttgctggatcttgaggtagactgattcccattttcctgagacactgccatactgatttccaaagtggctgtatgagtttgcactcccatttagcagaaatggaggagcattcccctttctccatatcctcttcaacattaactgtataattggtgttttttattttggccattctgatgtgtgtaaggtggtatctcagagttattttgatttgtatttccctgatggctaaggatattgactatttcttaagtgtctttcagccattttagatttctctatttagttctgtaccccactttttaattggattatttggtgttttggtgactttcttcttgaaatcttgaaatttgcaggcaaatggatggaactagaagaaaccatcctgagtgaggcaacccagtcacagaaagacaaacatggtatgtactcacacatatggatattagaaatagagtaaaggattaccagcttacaatctacactgtcagagaagctaggaaacaaggatgaccctaagagagacatacatggtgaaccggagaagggaaagggacatgatctcctgagcaaattgggagcatgaggggagaggagggtgagtttggagaaagaaggggagaagcagaggggagaggaggacaggatggagcaagaagatcaagtccagggaagaatagagaaggggagcaagaacagagatatcttaatagagggaaccattaaagagaaatctagaactagggaaatatccagagatccacaaggatgaccccagctaagaatctaagcaatagtatagaggctaccttaaatgcccttcccctataataagaatgatgactaccttaaatgccatcctagagccttcatccagtagctgatggaagcagaagcagacacccacaggtaagcactgagccgaactcctggaatccagttgtagagagggaggagtgatgagcaaaggggtcaagaccttgctggggaaacccacagaaacaactgacctgagcaaatgggagttcacagaccccagtctgacagctggggaaccagcataggactgaaccagacctcctcaacatgggtgtcagttaggaggcctgggcagtctatggggcctctggcagtggaaccagtatttaccactagtgcaggagcagactttgggagcccatttcccatggagagatactctcttagcctagatacacagggaagggcgtaggccctgccccaaatgacttgacagacttttgtgatccctcatggaaggcctcaccatcactggggagtggatgggggggtctgtggggaacatgggaggatggaagggagaagaaactgaaattgatatgtaaactaaggttgtttctaacataaataaaatttatttttaaaaagaaaaagttcagatttacaaatgaaaaacaatcattaagtttagggccaaaattaatcaaatttttaaaagtaaaaattgcaaagaattaaaagaacaaagagttggttctttaaaaagataagcaaaactgacagactcttaaccaaactaattaaaagagaaagaagacacccagattaataaaactggaaataaaaagtatgataataagttggcaacacagaagaaatatttgagtacttctgcctgggcacaagtcaaaggttgtgatatagaaatataaaactccaagaggtttgtgtcttaatccagaatgttggtagcatcattttttaatacttacctttttctttttttagcaagaaaattattttacatctccctctacctcccctcctccgccacccccccccaactaacgccctatccatcccatagcctttctgtgcctcaggaaggatgaggccttccattgggggggtctttaaagtctgtcatattctttggaataggacttaggccaacccccttgtgtctaggctcagggagtatccctccatgtggaatgggctcctaaagtccgttcctatggtagcagtaagtattaatccactacaagaggtcccatagatttccaaggtctcctcactgacacccacattcagggggtctggacccctttgctcatcagtcctccttctctgcatctggatttcagttcagttcaaggtttagctgtgggtgtctgcttctacttccaccagctgctggatgagggctatgcgatggcatatgaattagtcatcaatctcattatcaggggaaggcatttaaggtaacctctcctctgttgttcagaatgttagtttgtgtcatctttgtagatcttcagacctttccctcatgcctgatttctctttaaacttataatgtctccctctattatagtatctcttatcttgctctcttctgtccttcccccaactcaacctccctgtgccatcatgtcttcctcaccccacctcttctccccttctcattcccctagttccctccccactcccggatgctcccaattttctcaggagatcttgtctcttttcccttctccaggggaccatgtatgtctctcttagggtcctccttgtataccagcctctccggcagcctgggctgcagactggcaatcctttactcaagtctaaaatccacatatgagtgagtacacacaatgcctgtctttttgtgactgggttacctcactcagattggtttcttctagttccatccatttgcctgagaatttaaagattccattgccttttttccccgctgagtagtactccattgtgtaaatgtaccacattttttttctatccattcttcagttggggggcatctaggttatttccaggttctggctattacaaatagtgctgctatgaacatagctgaacagatgtccttgttgtatgaatgtgcttcttttgggtgtatgcctaagagtgaaattgctgcatcttgtggtagactgattcccattttcctgaggagtcatcatactgatttccaaagtggctgtacaagttggcactcccaccagcaggggaggagtgttcccctttctccacatcctctccagcataaactgtcattggtgtttttttattttagccattctgacaggtgtaagatggtatctcagggttgttttgatttgcatttccctgatggctaaggatgttgaacactttcttatgtgtctttcaggcattttagattcctctattgagaattgtctatttagttctgtacccaaatttttaattggattgtttggtgttttggagactagcttcttgacttctttgtaaattttggagatcagccctctgtcggatgtggggttggtgaatatcttttcccaatccatagattttcattttgtcttgttgactgtgtcctttgccttacagaagcttctcagtttcaggaggtcccatttattaattgtggatctcagtgtctgtgctactggtgttatgttcagaagtcggtctgtacaaattcattcaagggtatttcctactttctcttctaataagttcagtgtggctaggtttatgttgaggtctttgatccatttggacttaattttgtgcatggtgatagatatggatctatctgcagtcttctacatgccaatatccagttatgccagcaccatttgtagaagatgctttctttattccattgtatagctttggcttctgtgtcaaaaatcaggcattcagaggtgtatgggttaatatcagggtttttaactgtattccattggtctacctgtctatttttgtgccaataccaagcggtttttaggactatagctctataatagagcttgaagtcagggatggtgatgcctccggaagttctttcattgtacaggattgtttttggctattctgggtcttttgtttttccatataaagttgagaattgttttttcaagttctgtgaagaattgtgctgtgattttgatgggattgcattgaaactgtatattgcttttggcaagatttccatttttgctttgttgatcctgcctatccaagaacatgggagatccttccattttctggtatcttctttaatttctttctttaaagactcaaaattcttatgatacaggtctttcactatttttggttagcattacctcaaagtattttatgttgtttgtggcaattgtaaagggtgatctttctctgatttctttctcagcacatttattatccatatatagtaggctactgattttttgggttaatcttatatcctgccactttgctgaaggtgtttaccagctgtaagagttccttggtagagttttttgggtcacttatagagactatcatatcatctgcaaacagtgaaagcttgacttcttcctttccagtttgtatccccttgatctccttttgttgtcttattgccctagctagaacttcaaggacaatattgaagagatatggagagagtggacagccttgtcttgttcctgattttagaggaatagttttgagtttctctccattcagtttgatgttggctgttaggttgctgtatattgtttttgttgttgctgctgttcaggtatgctcttgttatccctgatctctccaggacctttatcatgaaggggtgatcgattttgtcaaaggctttttcagcatctagtgagatgatcatgtggtttttcttcttcagttggtttatatggtggattacattgacaaatattcgaatgttgaaccaatcttgtatcccagggaagaagcctacttgatcatggtggatgatttttctgatatgttcttggattcggtttgccagtattttattgagtatttttgtatctatgttcatgagtgatattggtctgtagttctctttcttagttgagtctttgtgtggcttgggtaccaaggtaattatagccttgtaaaaagagtttggtaatgaaccttctgcttctattgtgtggaacaatttgaggagtattggtattatctcttctttgaatttctggtagaattctgcactgaagccttctggccctgggctttttttgttgggagacttttgatgactgctgctatttccttagaggttataggtctgtttaagttgcttatctgtttttgattcaattttggtaagtgatatctgtccagaaaattgtccattttcttaaattttcaaattttgtggagtacagttttcaaactatgacctgaagattctctggatttccccaatgtctgttgttatagcccccttttcatttctgattttgttaatttgcatgttctctctctgccttttggttagttgggataaaggtttgcctatcttgttgattttctggaagaaccaaatctttgttacattgattctttgaattgttttctttgtttcgactttattgatttctgccctcagtttgattgtttcctggctcttctcctcctgggtgaatttgcttccatttgttctagagctttcggttgtgatgtcaactgtctggtgtgactattcgctagtttcttcatgtgagcacttagagctatgaactttcctcttagtactgctttcaaagtgtcccataagtttgggtatgttgtgtcttcattttctttgaattctagcaagtctttaatttctttatttcttcattgacccaggaatggtgcaattgcgtgttgttcaatttccatgagttggtagattctgcaatttgttttgtttttgaattctaactttaaagcatggtggtctgataagacacaggggattattccaatttttgtacctgttgagctttgctatgttgccaattatgtggtcgatttttgagaaggtcccatgtgatgctgaaaagaaggtatattcttttgtgtttggatggaaagttctatagatgtctgttaatcccaattgggtcaaaacttctgttagttcctttgtctctttgttaatttctgtctggtggtcctgtccagtggtgagagtggggtgttgaagtctcccactataactgtgtgaggtctgatttgtgatttgagttttagtaatgtttcttttatgaatgttgtgcctttgtatttggggagtatgtatttagaattgagacttctacctgatggattttttctgtgatgaatgaccttcttcatctcttttgattgattttagtttgaagtctaacttgttagatactaagatagctaccccagctcatttcttgggttcatttgattggactatcttatcccaaccctttactctgaagtaatgtctgtctttgaattcgaggtgtgtttcttgtatgcagcagaaggatagattctgtcttcgtatccaatctgttagtctgtgtcttttaataggtgagttaagaccattaatattgagggaaattaaggtccattgagtgttcattcttgtttgtttttcatttgttggtggtggtggtattgtatgtggatttaccctgattttccttttgggttttcctaaagtttaattatctattgcctatgtttgtgcaagtgtagttaatttccttaggttggagttttccttccagtactttctgtagggctggattagtggttacatattgtttaaatctggttttgtcgtggaatatcttattttctccatttatggtgactgaaagctttgctgggtataatagtctacgctggcatccgtgttctctcagagttgatagaatatctatccaggtccttctggctttcagagtttccatggagaagtccggtgtaattctgataggtttgcctttatatgtaacttggcctttttcctttgctactcttaatattctttctttattctgttcttttggtgttttaattattatgtggtccactctatttggtattctgtaggctgcttgtactttctttggcatgtctttctttgggttgggaaagttttcttctatgattttgttgaatattgggtttcttcaccttctactatacctattatccttaggtttggtcttttcgtggtgtcccatatttcctggatattttgtgttaaggatttgttggacttaagatttttcttgcttgaggaatttatttcctctagtttattttcagcgtctgagattctgtcttccatctcttaaattcggttgggtatgcttgcatctgtggttcctgattgtttactcagcttttccacttccagcattccctcagtttgtgttttctttattgtctctatttcagttttcacgtcctgaactgtttccttcagctgtttaattgtattttcttggctttccttgatttcttgcatcttttggcttgtcttttcttcaatgtctctgagggattttctgatttcctctcttagggtctctatcatctgcatgaagttgtttttaagttgctttcttctgcttcttctgtgttgggatgttcatgtcttgttggtgcagagtccctagactctagtggtgtcatattagttttccttttgttggatgtgttcttatagtgtcgtcttcccatctcttcttccagtgggtgcaggtggtgtcacttcctttcctggtgtgtatgggtctgggattctcttcaggtgggtgcaagcaattgactctgggttgcttggtcctcaggggccgagtcgacctgcctgaagacccctgggcaggagttcccagagtgggcaggcagaagttgagcccaggtcagaggccaaagcagctcacctctacactctctgcactctgcactctgcattgcttggggatggagtagcccagtgatctcagcagagtcaggctccctgggtcttcagaaacccattcagtctgcctacagaccccagggtgggatttcccagagtggacaggtggaagttgggcccaaggtagggccgaagcagctcacctctgcactctgtgggggccggaatagcccaacgatctaggcagagtcagggcccctgggtcttcagggacccattcaatttgcctgcagacccaggggtgggatttcccagagtccatctttttttaacttaaattgttgggaaccaagcagcctaggctctgatcagcatatgactacctgtccaatgggtttcgggggcgaggggcaatccatggaaatagattcttacttggcgaaaaccagtagacaaagagacagtgtaggaatttgcaagactcatgcagcttgcaggctcttttctctctcactctattgctgattcttttggaagtttttagttttgctttgtcagtcccacatgcaacgactataactttcccaggaaattctgttctttctcaaatgtttttcctaagaatcagcagggggctaatgcttctcaaaactcttatctggaattactaactaccactcttactcctgagaacttttctgactcattagagacagttaggtacatatgagaaaacaacacttggaccattaacgatgtctcacagttctagaaaggagagtaagtcatgcctacacagaatagggaaaaggccgcaggaatacacatagtgccaatggttgacagtaagttccctggacaccaaccacatgatagggtctagtatgatccaatagggaaaaatgcaatgtaaaatatgggatggatagactcatctttactatacacaggggtttatactggtggaagaagtatggtatattgggatgggaagagtgtctcatcaacgtctgccttttatagagagatcgagtcatgggactttgttgtagaaaaggcaactttacaaaagaatatcttgcagacatgaaagaactgtttgggtttgaatattgttttgtgtactgttaaagcattgtacccatgtctattactttttaactttgtaaccaaccacaagtagctgctagctgacccaagtactgcaagagcaggatgtgtctggcttgatatttacttaagcctgcaaagctgctgaactctatatctagagtaaagttatgtgtggggggtggggggagtgtattctgggaagcataaaggggaccaatgagagcttttataatgattataatgtatttcttaaaatatgatgtatttcttaaaaatcaaaaataggagccacaaataaagttgttcatgtaagcctggtagaaaaaacctctgttaaagtataaacaatgatggctaggtattctgggtcacttgaatgcaatccacatggtggtcagaaactttccttgtgccaagccatctcaggacctgaatccaggctggatcccagcattaaatactagttttcaacattatgttcttcccttgaatactcttatgtcctgagaaatttttctcaagactcatttattgattaattggatgggtgggtgagtgggtggttgattggttagttggttggtcagttagttaattggactcattggttccttgattgattgattgattgattgattgattgattgaatgaatgaatgaatgaatgaatgtagacaggctctttctatataactctggttgtctgagaaatcactctgtagaccaggctgtccttgaactcacagagatccacctacagagtgctgggattaaaggcatgcaccaccatcactcaccttaacaggaatgtctttgtaaaacatagtctttactgcaatatctagactggcttagagctcagtatacagccagcctggcttccaatttatgatgttatttcttatggccctaattgtgggtttgtgggagtgtgccaccacatctgtctacccaagaataattttgaagaggagataatattatttttctttattactcagaaactgaatgtaatttttttatataagaaagtgtttaaaccgtatttccaggaaaagccttcataagctatcttaaggtactatgaaactctaagcaacagttgtaaattatttttgaggaaggtcttacttgcataagtctggttcttagaatgtactatgtatcctaggctagcctcaagctcaggatccttctgcttcagcctccaagagaatgggattacaggtgtgccatcatatctatacagacttgaatttatttccaccatttctaatctctaaaaatatcctcagtcatttcaaatttattacaagttgtctttgaaattggtttttatttatttgtgaacaaaaatgattttaaaaaactccagttggtttttatattaatatgctaatttaaagcaaatttgttaaaattttctgttctcctgagataagatttagtattaagtagcctcttttcaccaatagtatgctgttgggatattggctctagagagcagaataattttttaatgtaaatgtttattttgaattagattaatattttactcaaacaattaaaaagtatagacaacctaaataaatattaaaattcaaaattaatattttacaatatcctaaaagcttggaatgcatacacagaaatcacttaagtcttaaaattattctagttcaacgtgtcaaaagagggactattaattttacatagttggtgccctaggcagagacatctctttgacattcaaaatctgttttaaaacattcactttttttctgtggcttgatttttcaaagaaatttcaatttaaataaaaatgattagagattaacattcaataatgcctggaggttacaactgggatccacatttgtcatttcttttaactttttcctcaaaggaaatcctgtttttaatgtagcaaaacccatgaggaaaacatgaattaaaaacatacacaatctttggaaagaaaagaggcacccatataaccattgaatgcaatggattaagacacagtaagtccttaatataacatatctgtctaaatagctagtgaagctttttttttttaaagagtaactactatatgtcaaagaattcctatgtattatctcattaattatttttttcaaaagaagtaaagaatagtttattctgcaccaaatatggcctgagaacatgaactctacttacgccaacttttacagtcataaaacaaaaataactcgtaagttaaggcacttgccaaatgcattggtggtgctcagcaggtcacatcaaactgggaggtaactcttctatatgtggcagatattataaccttctcaactttggggttgttacaagctagtggttgctaagaatctattccaaaggttttgtcttatagtcaaagaggtataatagtagactcagaggtgagtgataagtgggtattaagtggactaaaaagagcaaatgataatttcagctgtcaatctgcaacagtacaaatacccacaatcggaaatttttaatctgtccccaatcttcagattctttaatataggtatgacacacactcattatttttcatggatctgttgaaaaccatcagaatttctagaatgacaaaatccctctagtgattccaataggcctacctctaaggtggtctactttcacattctaaccaccatggagaataaataatctatagagaacctgtattgtgtatgttgaaatattttgaagcaagactcacaggattttttttgataactcttagaattccatctttaaaaacatgaagtttcatgaagtaaataccatacacctgccccttgcttgagaagtggtcactcttaagttttctcacttgagatgagctggccttctcctgattccatctccctagtcttctctaatatagcaccacacatatttattcatccacatttgtttctggacctgcattttggcttcttatcactcaaaagccaatatttggaagctgagactttatggaaagcaaataagttttatccaagaactttaaccttgaaaagctggagggattatcaccttcagagctccatcttgacagactctagtacctgaaaaggttattatagacagagaaaggagatgctcagagacaatagacaggaagacaaatgctgagtgaagtctctgtcctatcaggcatgtgtctatgtcctttttaatctggtcaaaacaatattagcaaccttggcttttgatactctatcttttgttagtcaatatccaagattaaataccaataataagtgttacaacaataagtattacacactctgttcttatctgaagctcacagggtgttctgggtatagtaagtctggaaaaaatagattattccacacttactatcaaatgtgatctgtaaatcaggataaaaaataccaaataaggcctagagttatagctcaatcaagaaatgccctcatcaccagtctggtgatatatatctttaatcaggagacaaagacaagtgggtttttgtgagccccaggacagccaaggatacataaagagaccctatctccaaacaaaacaaaaaaacaaaagaaattacttaatatgcacaaatcactggttttgatctctgtcaccacaaacaaaaaaagataatttacatagtgataatatgtggtgatattttgtttatgatataataaataaagcttgactaaagatcagagtgcaaagctagccccggccatagaagccaggcagtggtggcacacaactttaatcccagtaggcacactagttagtcacagaggccaggcagtggtggtgcacacctttaatcccagaatttgggagacagaggcaggaggatctctgttagttcaagatcacactgagttacacaaaattgatccagtctaaaagagaaacagagctcaccacaggtgatctcagcacttgggatcccacacctttaatcccagagttagtgagcaatataaggcagaaggagacaggagctgagggagtcaggtttggtggagagcagtgctgtctgaggtttggtggagagcagtgcttgctgtctgaggtttggtgtgaccccttggtctgagcattggtagaagtgagaactctcaggggctgaccacttcctctgattttcagtattaacccccaatatctgtctttgggttttcattattcatgctagaataatatacatgtctcatattatgaaaaattaaatggcacagggaaaacaaacaacaacacaagtatctttaacaactctcctctcctacagttcccaaactgttcattccaccattccattgctctggttggaccactcttatttcatgctgtacctgaattggaataataatcaaaatggtcaaaaaatatactgaagagtatggagagctgatggtgggctttgggacgggatcgttttatcccgtcagcaaatttcttctcaagccttatgggaacactttaggcactgaacacaacacgtctgtggaggatattgtgtatcttttgtttgtgcttttgttttgggtttttgtcatgcttgaagtcagattcagggtgttgcatgtgtcagagaagcattatattactgaactctatcctcaactgcagttgcttttgttttctaatagcactgtctcaaagaccaatcaatcaattaaggtgaagatttcattcaggttattggactagtcagcatttattaattaataactcaataaaaagttcaggggacttgtccgtggggaaaaagttcttcttagttgtgtaagagttttgaagataggtgatcttgcctggaaatgtgctaggccatggtggccatctgaatcagtctcagaaaatggaattttgttaacagtttttttttcctaactatgtaagacccaggtcaagttcattcaaaatcacccttgtcaaccagacttgattctcaggaataatcttaaccctcctccattccagaagatagccaaattaagaataaatcatatttttctgctcgccttcttgctcagtcagctttatctgggtatttacttgccatctagtatttactggacaagtatattccttatcatataatgtgacttctcatgtcccattgttataccaagtacaagtctcatttcatcttcacaaaacttcctgaagtaggtattatttcaatgtcattttacagaagcttatttccttttttatttaaaaatgaaaggagaggaggagaggagagatacttagggccacctggctggataaggacaggagtattcttgggcctactatttttagttccaaagataggtctgttgtgacctatgtagtatgtcccctttcatttctctttatcctggtttgatgaatcaattttcttagcttcttcattttttctatataggcagcctaaatatggctagaatgttggggagcctctcccagtttagcagcttcaagatatgaaaatgacttcaatttgaaaacattactctttatttctttaaacaagcaagaatttggtatatgatacattcactcagttactaaattcagagagcagtgtgtgatgaaaatcccaaaatgctatgtaattcatgccaaagcatcttgggctgcagatagatttatagaaaatgtaagatatttatgaacattatttttaggaaagcattgccctcagcaagttataaaatgttatcagtgttgccaattctagccgtgtttcttagaaggattgtctccatcagagctgaggtgcttcacttgacataataccacggcaaagcacctttgagtctaaagggaactccacacaactacctctaagcttgttttctgatgttggtaagtaagccctgtgagtaatggtgaaagcacatctgactaattggatcacctctggaaaacatagataaaaatggtgcacccaagccaagtatgaaataagaggcagctttgggggttacatgggacaaacagttataaaagaacccatgctttgccaggaaactagttctgtatgtgttttactcagaccctttggttacaagtcttagataccagcccaagctcaccagaaaataagaaaggggcatttttaggagggaacatgaatctcatagaacctgatagcatcaatgtaggtagacctaaaaggggctagatgcgataggaacagcagtaagcatttctcatttatgttcatttttgtacagccttcctggctctcatctcatcggtttcttagcttccaaatttcctttgtagggaatatatgcactttctgttttcttggtgtgtcatggctgttatacccttgaactcaagggcaactgtggttatatgtacaagacttgcacaagactgggcttgtcaacatcctatcacagagtaaggatgagctcatgaggcccaactgctttctgaggcactataggcagttgatggttactaagagaaagacgttctcttcagtgtctatccattagtaaggtgtccatgccaatgaaatccgttgagtcaccattttagatgcatgagaataaagggaggatcagttaggagaaggaaaatgaccagtgggagtatgagggaacaagagaggagaaaggaagtgtgatcaaattacattatatacttgtataaaatgtcataatgtttcatgactgacttcctaagcagacacaacacacacacacacacacacacacacacacacacacacacacacacttactcaccccaaaaagagaccctacaatatgccaacaacccctggcaggaggtctatggctggagttgctgatagtctgggtacaacaggcatccttgtcaacctaaatgttattcataaaacacaaagaatgaaacatcatgacacaaatgtagctgtgtcagactttgggtgccacccattttcttccctgcctcttccctggatgcctcttggacccattgctactccccagttgctccactctcgtcataatccaggtcacagtctctttcacctgggttgccagaccctctataggtccctcaactttccccacctctagacatgccacttccagtcctctctccactcatgagctgaaagtagcttcctcaaagatcctgtttgaatataaccactgttccgtggttcccatggcattcaaatcaaagacaaaatgacttcatgtggtggatcttttcaataggaatatcaatgtggccagaacaaaatagtgccaccacactacaggagagcagagaggaaacacttctactctagtctcttgcttctttctagagcttccctgacagctcatactctaggactccatgtttgagtcacaacttagataatccctagagtccaaaaacttctcctgaaaacaaagactgtctctcattttacaaacacctcccaagacatgatgttataatttgtagactcacatagtgctagataacaataagctttttggtggcaccctacctggctctgaagtcttctagtcagggaaaccaacatacaagagatgtcttacctaagtccatgaacctttaaaataaagaaactaagaagaagttcagaattcacaaatttgtcttcttttcactgtaccaagaattcacctaaaataaaacattagtataaatgttaagctctctgcacccaagctctgaacttccatgaggaatactgtccttggtgcagtataccaattcctgctgtccttataactagagagctcagcattccctgacctcagctttgcaagcagcttaattctaaaaacattttctgattgacagaaacattttgctgaaaagtaatacaattaaggtacacccttgaaaccaatttagagctgattctaacaaattaacctttccgaacaaattgacaggtcacctcaggaaaaatcacaagtaaatctgtcttttgaaaactgaatcctcaaagacagaattggctgcctctttccacaaatatcttcctttgttttagtatcatattggctaactgtcagtgaaaatggagcattttatttcttaaatctccatcatcaattgtttcatcccatgctctagtgggtagcatttctactttctgagatgtttgaggggttcaaatggcttatattagtttgcttagaattttcaattttctctagaattgaaaaagaagtgaattcaatttgtcagtaacagattaagcatttctagaatgtactcatttgcacatagaacttaacacacagtacctgatgacccaaataattcaatagagcctataaatgtgccaatacatcagcctacacatataataagtacttttctttctttcttttgtctttctttcctttttgtttttttttcgagacaaggtttctctgtattgctttggaggctgtcctggaactcactctgtagaccaggctgaccttgaactcacagagatccacctgcttctgcctcccgagtgtgagattaaaggcgtgcaccgccaacacccagcaatcaagtacttttcaacaagaactaaatagaccacatggatattcatttatttgttcattctattaacattttatttagtaccagttattgtcttagttaggtgtctattgctgtgaggagacaccatgaccctagcaactcacatagagaagggaaagtcaatagttaatgccagatgcagtaggctccttgtgtcacaaggtgaagactttatggcatactagtctagactaggtgaaggaagcatctctgattctagactgaaatattggttcactgtgtgccaaagatgctgtagctaggtccagccagtgacagtaaaaataaaaatacaaaagctatgacttatatgtttttacttagctctatttcaacttttttttcctcttccttctcttagcttcagctacaaaatttgccctctattccatttggccttgagtaaaaataacagctatcatttattagccagacaggcgctgcactgtgttcctgatggctgtatattacatcttaatgggaactactaggtggtgtcattatcttcatgtcacacatatggaaacagagccaccagaaggcactaagactttgggcccagaaagtacactgggtggaagccaatgtccccaccatcattatttccaggaactaactaatacaataagtcttttctctggctgacatgggtatatctctccccacctgctccctataaatcccctttcattctaaagaaggaatcgaatccactatgtttgaataccaggcattctgaaataatggtaggtgttgagagaggaggagaccattagaaacaccaagtaacatctatggttacttgcataagacctgcataagatgaagtcaggtaaaaattcaaaatgaaaagactgttcagttgttaagtaggcttgctgcccttacaaaggaccttgcttgtggttcccggcatttatgttgggccgcgcacaactgcctacagcccccagctccagaggatctatcaccttcttctagcctccacaggtacctgcatggatatacagacacaaatacataaatagtaattaaataatttttttggaaaaaaaagtccagatgatctaaagctcagagaccattgcagaagaaaggccataaaatttgtaagagtcagaggaccagggagtttgctgtgagattgtgcatcctaggaatgtcagcagctacacatacaaaatctcaccaacatgaatgcctaaacatgagctgaacaaggacaacaacacacatgctaaagtgagcaaggaaaatcccaggaggcttcaaacctacataaagaactgcaagcaactaagtaatgttgagagcaggagaaatagtcttcccaggaaaggttacggcaattggctatccaatatcaaatagtcagccatgaaaacatacatatgaataacattatacaaaccaagcaggctgaatttatatatttagtaatatatctataggtatattaggaatatacatgcattatatataatgttataattaataattaaaagagggcatgaattggaaagagagcaagtaggagcatatgggagggtttgaagggaaaaaagaatagggaaatggttagattctattaaaagaaatatatattttaattccagtatggaagagggtgggactcctgatgatttacccttagctaaggagctattgcagttgatggatgctgagaaagagtccttttctttgagtggttagtcattggtagcttgcttatacgtcagtggatgctcccatgtgcatctgtatatggacagcaatatttgaattagtatgtcattttttaattataaaggacatgaagttgaggagagatgtcctaaaggagttagagggagggagtagggagtagatatgatcaagatacattttatacatgtctaaaactttcaaagaaagagaaaaaagtcatctgatttgtatgttgaaggagcagggagataaacacatttactttcagataaatttgcaaatggatcacctaacaaccaacaaagagatatcaaaatatgcccctgactcacctgtacccacttgagagctgtgttgattccagacagtctaggataagcctaggcatcttagcaattactgcacacacataggtggcatgagtcaccccagctcacacattgtgaagtcttatacaatggctgcatttttaaagctctcaatcctctttcaagtgtttttttttcctttaactttcactgcattttttcccaaaatagaaggatcagtgcaccatgacccatgaaaaaactcagaaccataaaaacatcaccccatgtcctaccactaccaaataatacagccttggtcttgataggaacttctatataacctcctaggcccttgttgtctttcatcttccaaaatgtgagtcctccctctgctgggaagactttcccctaagatgatgtccatcactcttctctacgtgccccccccaaaacattctgcagcttattagtaaaccgcatccacagccctgtgtagtgactctgcatagagggacctttttctatgtacccaaagtccttagtataacaccgggattgtcaaactgcaacatgcaggtcaaatctggcccactatttttatacatgccttgagctaatactaacatatttttaagagatgtgaaaaataaaacacaagaaaaaaatgtctgtatttagtcaatgaaacataaactctttcctgtttggcccttcccagaaaatgattatttaggcttagaaaatagggacctaatcttacatgattataaatgtacccctagctacatcaatattaaattcattctgtcaacacataaaaccaatagggttcctaaacatactagatgttttccattccttcatgttctttactcaagatggtccctttttgctttgcctcatactatttatctctctctctctctctctctctctctctctctctctcctcttctctctctgtctctctctgtctctttctctctgtctctctctctgtctctgtctctgtctctctctctctctctctctgtgtgtgtgtgtgtgtgtgtgcgtgtgtgtgtgtgtgtgtgtgtgtgtgtgtgtgtgtgtaacatatggaaagaaatgcaatgacctcatgagtacagttaaagaaagtatgattaaagtaaagaagaacaacaacaataactagggagctggctcaggcagtaaagtgtctgctgtacaaggatgcggacctgagtttggatccccagcacccatgtaaaagccgagtaacatggtgcatgcttgcatttccagtgtgtggctgaagggtggagacagatctccagagctgactagcataccaatctaaccatttggcatgctctcagctcactaagagaccctgcctcaaacccaatcacaaaaagacaaacatggtatgttctcactcatatatgatttttagacatagagcaaaggtttaccagcctataatcctctaccccaaggaaactagaaatcatgaatgactctaagataaatggaccccaggaatgggaaatggcattaactcccgagctaattgagagcatgagggtagggaagtgggtgctgccacaataagagcacaagatgaagagtagaggagaagaaatggaggagcagatatattgagttgggggaagaatagaggagagagagcaggatgagagataccatatcagagggagtcactataggtccgagaagagatctggaactaggaagatctccagagacctataaggatgacacgatctgacagtctgggcagtggaggagaagttggcctagaaacccttcccctagaatgagattgatgaatactctctatgctatcctagagtcctcatccagtggctgatgagagcagagacagacatccacagaaatacactgagctgaaatctggaactcagttgaagagagggaggaatgaagaacgaaggggtctgtacctggttggagaaacccacagaaacagttggcctgaaaaagggaaagcatatcgaccccagatgctctttgggaggacagtacaggactaatccagccccctgatcatggatgccaatggggaggcccctgcactcctgggagcctctggaggtggactggcgttttgccctggtgggtgggagggacttcgagagcccatcccacttgaagggattcgctctgtctctgaacacatggggaggggcctaggcccagcacaggaagatttggtggacttggtggagccctggttgggggccctaccctgcctggggagtggcgggtggatggggtggggggtaggttggaggtgggggagaaggaatgggggtggggggagggagagggagagggaaagtacatgtgaaaatattaataatttaataaaaaaaagaaaaaaatatataatgcggggagccacagaagaagacacacaatatctacctctggcctccacgtgcatatgcacctacctgcacgtgcacaaacacaaacaaatgctcacaatacactatatacacacagaaacacaaggtcaatttttttaaattttggttttggtttttccgagacagggtttctctgtattgttttggaggctgtcctggaactcactctggagaccaggctggcctcaaactcacagagatctgcctgcctctgcctcccaccaacgcccggcttcacaaaatcaattttaaaactttttcttattaaactatagaacttttccagtatcacatcattttcttccagttgttcttgtttatcagaagccaacaaagggcagtcctgcatttttgttactgcgggtcactttcctctcccgggagagacaagtacataaactgacactctttactggctttttttcattcagtgtactacactggaagtccattcagtgtgcttctagagttagcccatgcttgttcacaggattttgaaagctattaaaaaaaaatagctgttctcttgcacgtattttatggcctgcagttttaggtttttatggggttcctgtgtttgtgaatgagtgtgtctctcctctatatattttctttggctcttttccttttgtttgttttgtcctattctggttttatattattttattattatttttagatgcctgtttatatactaatgagagagaaagaaaggtttcggatatgggtgggtagggaagtaggaaggaactgggaggaattaagaggaaaccataatcagaatatagtttattaaaaatatttttaattaaaaaattttaaaacagctattctttaaattaaaatttgatagacttacaactaaataaattatatttacaatatagtacttgcatacatcatttctgaatttcattatttattctcctgtggttgttttatatgtataacaccgtccttctcttcccaaacctgtgtccatcggtaacttgaaattggccatggtggaagcaattatgcaaggggaatcagcaaatactacagaacagaaatcacttgtatccatggctacagagactattattaaacattcactgctagatatatctatgctgttgcacatttcagtagctcatttatttttattgctcactattatgtggctattgtgtgtaacaactttctttcactatgacaaaagacctgggaaaatcaatttacaaggcagaaatatttattttagctcacagcataacccgaatgcaacaagactgaagaaggggctggggtcccataatccccttgaggattatacctcatatcttaaaggttccactacctccgtgtagcaacccctgagcctttgggtgaccttccaagtccaaaccatatcatgatttgaaaatggttaatccagagctggagagactggcgagtcataatacacttgtgtaaacatgaggacctgagtatgattccccatgcccacgtaaaaaaggctgaggagtgacatgtgccagtattcccagcactggggaggcagagacaggcaaatgctggggcctgctagccgactggcccagccaaataggtgagcttcagcttcactagcaaagccattctcaaaacaagagggaggtaatttttaaaagacatccagcacaggcctctggcttctacatacaagtgtacacaaatgcatgggcatcttcacataccacacacacacacacacacacacacacaatcacacacactcatataccacacacaccccacacaacaccacaatcaccacaaacactcatatacacacataccacacacatacaccacaccacacacaacacactcatatacaaacatacagcacacataaactacacacactcatagacacacctcacacaccacacatacacactcatacacacacacataccacacacaccacacacatacaccacacacacacacacacatacaccacacacacacacacacacacacaccacacacacacacacacacatacaccacacacacacacacacatacaccacacacacatgcacacacatatctcacacatcccacacatcccacatacacacacgtctcacacaccacacacactcatacacacacatataccacacatacaacacacacacacacacacacacacacacacacacacacaccacatatacacacacaaaagaaaaacagtttattcatattattgctagctttctgtctttgtgccaaaacaagtatatattgctttgtcatggttaaaatagaagctgatattttctgacccattttggtatttgactcacttcctgctaagcatttggtttcaatgataagaaaaaatacctagcacatattttaaagaaattttcatgtacttagaaccatagcctgaaatgtattctgaaaaatgactgagatttcttttgacttagaaaaatcacttgatctgtgtttaggatgtcgtataaacagactgtagacaagtgtctgtccagttgttactaatgtcaaactgcaattcccctatgattttccttagatttaattcaagcctcttcctctgttgctattcccagtagaactggctcatgatacaatcacaatatggtatttctccatggcttgaaaattttagtcaccttctgatctcaagtttaaaaactttatgtttttaaccattctctgacttctcctctccttttattttactggtttctcaagaatactctatgagttccctagattttgtttgactctgaattaaacagtgcatctggataaaatttgccccatcattgcatctaaagtttcatgttcacttaataaagcaaaatgtatttactccatctctaagcatggcaaaagtcttaacaactctaacaccattcaaaaagcccaaactcaaagtcctactctgagactatggctatttctgaactgcaagcccctgtaaaatcaaaatacaagtaacatttccaaaacaaaatgacaccaagtaagcatcatcctagaagggaaacacaaaggatagcaaggaatgatgaagctaaatattaaaaccaataaggcaaacactaaaccatcagctctaggcccagtatctagagttcatagtagtcttgtcttacagcttccttgtcctccagctacctggatcataggaaaaatggaccctaaggaattggatctcctcttttctatgccaccccagcaataaataacatgctgggaaaagaaaaaggctaaagaccaggccaggcagaagaggaaattttcctcctgaaaagatgtttggaacttgtcagaccaccttgcaagagaatggagtaaagacaatgatgggtcagtgattagcaggaccacaccttgacctgaactacccaactatgcatatttcttatcttctatttaaactttaccttcttctggagagagaaatggcagcatagatgagcacttgctgctgttacagagtacctgagcttgcttcccagtaccatatcagataggtcacaactgtctgtttactctagctctaggggatttgatactctcttctggcctccatgaaaacaagcacacatgtggcttacactcacacagaaacacacatatacacacaaacaaaaataaaaataaactttgcccttgtgttaatacccaaaaggtagacttggccgatatggctgtttgaatgagaaatgttgctcataggcgtatgcatttgaacacttggtccctggtgctgcttagggagggtacagaacctttaggagatatagacttgctggaggaagtacatcactggggacaggttttaaaggtttataacctttccccacttcctgtccaccctcattgttcttgtgtgatgtggtatatgtgattagttcgttttctgctcctgtcagctttccatgacatccctgacattacaaactctcgtccccaggaaacataagccaaaaaacactcttgattcatttttttctttctttttgcttttttgttattccttaattgcttttggtcacagtattttatcacagcaacagaaaagtaactaacacagtggttggagtaatcagatctctttgccactctccccatgtggtcatgctgaataaatttcttgttattctgcttttcactatcaacttgactcttttagttgatttacaagtctggcttgggatgtagtatcgggtagtcaggacacaggctttgactctaattctgataacagtctgggctccaagaggcttggataccctacccctgtatttctgctgtctgcatcacatgtggcatcgcttttgggctggctccactttaacctgaaactgcccatacaaacactgaatgcttctagcatccctgacatcctaggatctccactgtaacgtagcttcattttcatagcttcatagagactactttagtaccaagttgtgatggttaaacttcattgtcagctccacactaaaatcatctgggagagccaccatgatcaattgtatcttttcttaaactgtgagtcaaaacaaacaaaaaaaaaataaaataaatattttccctggaatttcttctgtcagggcatgatgttatagcaacaagaaaaataactgcatttttacattttacccacatgttcttggatatcttggcttgtaggtttgcttattcttttaagttttgataataaaacacctactagggtttgttatatgattcagagttctgggaatttaaatgaagaagtgattacataaaattctaggaggtatgaatgactagtagaatttgctgaagatcctggaagctcatggaagaatatctggaatgttattaaggttgataaccttacaaaaggcttccaaagacttacatagtaacacaaaagcaatgatggctgtaggtggaatccagaaaggatccaattttgccgaacatcctggtgtatgtaattacaagaagcattccaggtaagttgtaaagagatatgagaagaaactttaattaacttatcaaagacaatatataaaaaggaaagggacaagatctcttgagcaaactgagagcatgtgggagaggagagggagctaggagaatgagaaggggagaagatggggtgaggaggtcataagggagcaggaaggttgtgtagtgggaagaatagaggagagcaaaaaaagagataccatcagagagggagccagtataggtttaaagagaaatcaggcactagggaaatgtccagagatctacaaggatgacaccaactaaccatctaagcaacagtggagaggctaccttaaatgccctcccctgataacatgattgatgactaacttatatgccatcctagagccttcatccagcagctgatggaagtagaagcagatacctacagctaaacattaaactgaactggaatccagttgcagagaagaaggagtgatgagcaaaggggtcaagaccaggctggtgaaacccacagaaacagctgacctgaacggggtgctcttgacccccagactgatcactaggaaaccagcatgggactgctccagaccccatgaatgtgggtgtctgtggggtctcttgtagtagatcataggaatggactttgggagcccatttcacatagaaggatactccgtcagcctagacacatgggggagggcctaggccctatcccaaaggatatgacagactctgaagactcccccccaaggaaggcctcattctccctggtgagtagaaatagtatgggataggtagggtgttagtggggggcaggggaggaggggtgggagtgggaactgggattgacatgtaaaacaattttgtttctaatttaaatttaaaaatggaggaaaaacaaaaaaaaaggaaaagaaaaaggaatgtcttcacagagcaattgatatgtctaagacacactgggaaaagagattccattttcagtgccaactcacctaaattgacagaaaaataccacaatgacttttttttttttcacaatggctccttgaatggattctgaagccatacctctgcacaataggaaaaactctgtgcaagcaatgatgtctcctacagccactaagaggattgtggtagagagatccttcaggctacttgaaacccatgggatcttaaattaaaactccgtgcactcagaaaaataggtatttgtgcagaagacatttgtgtgtgtgtgcactcacacttaagattcaattacatttttattttgtgtaattaatagtcatacagataatttggtcctgagtgtgttaacatgatgacaccctgttaaagtaataagaaagtgaaagagaaaagtcacttcaaagaccgagttgaatgaaatgtctgaaaagggaagactaggggttcccttctgagcttgttttctatgttgcattatctttagcattcccattcagtcttgggcgataaaagggaattctgatgctcagtggccactccatttactgggcatctaaagaaatctgccctgatacatgcacaagaacttatcttttcttaactgaagttcccgaaaacaaacaaaaagctacaaagataaaatcatttctaaaacaaagtatgcatcagttgactagcaacaaaaagaagcctgcctttgagttcacagcttgattctacaggagtcgggaatattagtaataaaggcaattgactcaaaggctaggtgaagctgtgttcatggttatcctgaaggcattcaaatgtcaaatagcaagaccagggattgcattcttgtattgtttcctccggagctacttaactcttttcagaatggaaatgttatcttcaatatccctacctatttaagctcaaaatgataataagatattcagacatggtaccaggaagcctcagtttcttcttcatctccacccccttccccaaactcattttcagcttcaggaaatagaacaataaaccgtctaaaatcttcttgaaaaagtttattaagtttattaaaagaaaaaagtttattaaaggaaaaaataaaagccctatataagcactgttatctagatgtgggaatcatggacactcactcctttaggctcccctaagcagtatggccgaagagttcactatccttagaatgctgcctcaccaggctaggactttaggttggaggaaggagcatctgccattgaagaaaaaatctggggtttatttcatgtgtagtgatctttgcctggagacctgagttcagacctcagaacccatgtaaaaggtagatgtagagaactacaaaaagttgtcctctgactcccctcccacatgcaccatgacacaactgtgtctacacaagcataatgataacaaaaaaatttaagcgtatccaatataatttgcttgatgttgggtgcaaagatgaaacattaggtatctggaactcaggaatccccccccctccgcactctgctgctatgaaaaactttaaaatgtgaactataaggacccagagcagcatgtgaacacctacattcattatacccagaggtacagtgacattttcattattctggagggcttttgagcaagaaaggccaaggaaaatgaatatgctggttgggctgttgtcaacctgacacaaacctagacatatctgggaagatggaatcttctgggggggcgtggtgaacattattaatagtactcaaaagagtaggcctccctaagcccctcctgcttttctggagtctgggatgcaaactgtgagggagatgctgtattaggggctgagttgggacaggggctgctcagcagctggggccctctttcttgctggggtgggtgatccagagcaggcttcttactccttggaggccatgtaggccatgaggtacaccaccctgttgctgtagttctattcatgtatgtgctgcacagacatacatgcaggcaaaacacccaaacacataaaataaataaatatgcttaattaaaggtatattgatacaaatatatgaaattgtgaaagaatagttttttaaaaaattaacatataaaagaagccagttggcagaagactggacacctttccccacagggttacatgtaataaaacagaataaagcctaattagattcccagtatagaagaagacagatgctgtataagcatcctataaagggccagaagctgggggctcaaggcttctgcatgtcagtcttgctctagatccctgctctactccctgagcttcccagcctctgaatgtggtggtccccaggctctggaatgtggtggtccccaggctccatccttctgtaacagccagagtgttgagaacacccttcaaactcctgtacagcaccactccagcttcacttctttaccagaggtctctcccaggtatccacagtgggtcaattggtgatgtcctgatagtaacttcaaacccaacccacagttcatctgcctaatgacaagtctgagctccctcacccaagcttcctcccataccctcgatgccctccctctagtaaacccatggaggaatgactgtgcatcctaggtggtctctttacagctgttacccattgctgagagtttaccatgtgttagtagctgtgctaactctccagatgcttttcctaaattatggtatttcatcacagtatgtccctggcacggcggtgaagaaggcactgggagggtggcaagctgccacgcttcttcccagggcctctctaggtccctaccagtgccttataggctcctttgcacaaaggtgaaacagttggagccaaggagctccaaactgtaggtttatccaaggcggctggctagatcttgattctagaaggttggactaagtccttctcagtgcctcacatatatctcacattatatttcttttgcaggattttgtgagactgggccaccagaatagtgatggcagagccactcggagacatctacactgcgtatacaggtgagggcccaaaaagatctgcctgggacctcctacagcctggagggggtactgtaacaataagtctttccgccaagcctcctgagtctgctgccatgtggatgctttccaccaggccgcccaagttctgcccacctccatgttatggtcccaagtaacacacagagacttatattaggtacaaatgctgcttggccaatgactaggatttctcatctgctagctcagtcttaattatcataaatctatatattttataagacttatcagatgccagtggaagcatcccaggctcacatggtgactctcctttttcctacctttcccagaatcctccttgactcctagtcccacctatcttgttttcctattggccaagaatactttatcaaccaataagacaatcatacacacagaaggacctcccccatcaggatacctagctctgagacaagtatgttctgaatgttattttagagatgaaaaaattgagccattccagaagccacaaagcctttaccaagtcctcctggtagccgagacttgaatatggcctttgtctgcagagcccaggctcttaggcctcttgcaatactctccttctggtgtcatcctttattcccctctttctacttccaaggtatgtttgctgtgctcagtgtcactaagatgtgaaaggtggtgcacagagacaccctttacctagtatagctagtgagcaaggaagttcagggaagtctgttcccctgaaagatcagacaacctggaaacagccccgggtcttcgggattctcagctgctcctgaaagggacaactgctcacattctcccagatcctgggaagctcccatctaccaggcctgtgacgaatggtggagaacaagaggaaaagaagggccagaaagacttacgcatcctccgagctccttagaatattatctgggttcagaggacccagaaggagcctgaagcaaatggagctctggccccaaagcattttgcatcctaatcactaaagtcttctaggaatagagaagttagggcagcatccaaaccacccttttactatagatgaggttttcttacagatgactgtaagttcatcatgggaattgaacaaaggttattattccttgaatgggtcccaacctcaaagatttatttttgtaatttttgtctgttgtccacatctatgtaaagcaaattgtttgttgataaatttcgccaaattgcaaaaagcctcagaagttctttcctctggattttaatacattccagttttccaatgagctccagcaatgacaggctttcaataaatgtgacaggtttacaaccttaatatacaggtcactctagcttgaaagcaaaatcaaggtcaccataagagaaagtgatgacaaaagaaaagccctgattctcggacaccatttcctacccacaggagtgatccagctctgccttacctttctctctcttgcaagtattttggttgggaaagtcggtgagtgtctataggatttctcctgctccaactgtctctactctatgacatctgttgccttggtccttggctaggatgctataacagaggcttcaaattttaccccctgcatgtagttgaattgatacataaggaaaatgcagggacagaggagcctcatcctccactgctggacaccttacacaaatttctcttaacacagaaaacaaagctactcctctctcagcacacagagaatttcctggaactaaacatattagcttagttgcaggaactaaatcttcccatattttaaattacttccctggatagttcttgtggtgctttgaatgaaaatggcccccatagactcaaaggcagtggtagtattggaggtgtggccttgggggatgtggccttgttggaggaagtgggtcacagcgggtaagtctttgaggtttcagaagctcaagcatcaagcttccttccatgatgacaattgactaagcctctgaaccataagcaagacccaactaaatgttttcctttataagggctggggaacctgcatgggaacaaactaagccctctgaaggtggataacagttctaaggcttgatctatgggggggttgcccctggcagtgggaccaggacttatcctgggtatacgaactgggtttttggagtccattccctatggtgggataccttgctaagcctggatgcaggaaggggctaggtcctgcctcaacttagtatactagactttgttgactccccaagggaggccttaccccctctgaggaatagatgggggtggaatgggggaggtggaggaaggaagaagggaagggagtggaaactggggctagtatggaaaatgaaaaaaaaaagaatttatagaaaaaaaacaaagaactgttgtgaccatggtgtctcttcacagcaatagagacccacactaagatactcctgtaggtaggacccgctcaaagtgtactgacttgtaaattggtatagcccataaatatgccttcagtcagaatccttccccttgtctaaatgaaagttcactctttctcgccagcagaggaaaggctgaagaacctgtaatgtctgtaaatacctgagaactagacagaggttgcttggaggggaagaaaagtctgcatagagtggggatatagtagaacatgcgttaaatgaaaatagagaggggctggagggattgttcagccattaaaggctaggctcacaaccaaaaaatataaaagcggatacctggtgtggcaagggttaaacagggacacaagcgggaagagggtttaccaaaactaagaatttatggaaaagacataaggaaacatactaccttataagctaatttgtgtcgttattttttagaaaaaaagagcactaaaatggaagtactctgcatgggtgaataatgctggtcccagaatccaaaggtcattgaatgaaaatcccagtgccaggtatgagatacttccctgtggggtgacaactgaaagaaatgctaccatatagccagaggacaataactgcaacagggcagcactactcccttccaagtgcatcagctacctgaattttctccagggatcccttaggtgctgatcccatggatctctattcctttccctataattgtgataaaatagtgacaaagcactgggcagtgatggcacacgcctttagttccagcactcaggaggcagaggcaggtgcatctctgtgagttcaaggccagcctggtctacaaagtgagttccgggacagccagggctattccacagatgtcctgacccacaggacgtcaacctggggcaagagagtcagggagagggaatggggacaagagacgcagaaagaacaaccacaagacaggattctgatcaagtggaaaactttatttttctcaggctagcttatatagtcagcagagcaggatatggggaggggtagaatgtgttgtttgtgtgccaggtgttagtgtaggcaggatatcaggaaaccacaaagagaggatgtttggcagggtaaagagttcatgagtaagcggtccaggaagggttgcctaggtgcctgagcctgctggtggaacatagggtagaggactggattaaattgtttattttcttgagctgaggttctaaagagctgctatgtaaaggttaatatataaccatgtgcctggtcaagcatgacgtaggatctcatgccaagccctgagatctttggctcccaacacacagagaaatcctgtcttgaaaaaaaaaaaatagtgacaaaggcaacaaagacagcgtaagcactgaaaggttcatttcagttcacagttcaaggttatagtctacaatggcaaggatatcacagccacaggagtttctgtgggctagtcacaccacatccacggtcaaaaagcaaggagcaaggaatgtttgagcttgtctctccttctcctgttcattcaatcctggcccaagtccatgaaaatagtgccacccacatttaagacttgaactagcccaatcaagaaaatccctcatagagcatgccaacaaaccaacctaattaagacagtccctcttaggtaatctcagatgacaaaaacactagccattgccccatgattaagcaggcacagaggaaagattcccctccagctttccctcagataatgctgccttggggagtttgttactatcttagtaatgctaagaatacctgtgagatcatagtcttcctgttcgccctgatagtcctgaacaggggagtgacgtccatccacacatagctcctcggccagcccctccctcctttgtcctgggagacacttctccagggatgcacatattctgctctgtgttcaagttggtgtaggatatgtcacctcggctcttaccatcttaaaaatccacactgagaaatctcttagagacactacaaagtggtttacccagccaaacacagcctgaccaaatatccatctaccctcttttgtttctgtgatcaccgtattaacagtttcacaggtcacagattacaggacacaccttggaggctactagtgtgtgtattcttaaatgtcttcctcccccccaacacacacacacacacacacacacacacacacacacacacacacacacacaaaatcatctccttataccaccagaagaaactggcttcaaattgggcccatggactttcaagagaacaaactcagaacacacttaataacaaaagaaaccttgtgccgggatagtttacatcacacagacacacagacacagacacagacagacacacacacacacacacacacacacacacacacacacacttgacttaatgaaacctctcttcttatttgccaacaaggagctccatgctcagccgctacggctcataatcaccactaagccacgggaagcacggcagtttgcaatgcaattttaatgattctacttgttagtgcttttgttccaatcaacagaatgcctgtagtgattgtaagcatatgcacaataagataaagaggtgcttatgaaagatgaaggcaggatgtcaaccaagcaccctggaaggcaatggttccagaggctggggtgcagtgggacctcacactcatccctaaccactctctctgtgcagctctgcattttttgcagtcttcaactatacttttgctttaacaaattgccctgctctctgcacttcactgaatgacttgtattctgcattgcacagtacaaaagactggcttcttctgattccccagtccatatggcagaaaactgtgaccacttcaagctcccaagtttaaagctaaagtacaaccatggcccaccttggggatgctccctcacccagcatgtttggaaggatgcctaggatatagtgaaaggatggggatagaggagagatggagtcattccatagtaagtcaaaagaaaggatgaaagatgcaccacccgtggtagttaatgttgattgtcagtttaatggggtttagcattaccatggaaaccaatccatgtgcatgttaccggatttcctagattaggttagctaaggtggaaaacccctcctgaaagtaagtggcaccactttatatgctggagtcccagactgaataaaaatgaggtgggtaagcagcagcatttgttgctctctgcttcctgatgtggataggatgtaaatagccacctcacacttctacttcccatgtcatggtatcctggactctcaaatgttgaacccaaataaacccttccttctgtaagttactttcatcaaatgttttcatcacagaaacaagacaagcaactaatacaaaacctatgtctactacactggggaaattgttcaacaggcaaaagacttgctcagttaatcacaaacatgttatgaatttcatgactgttaatctaaattccagcctcaggttagaatataattagaaatcagtaaatgtgacaaaaatacattcattctcccttcctaacgacacacccagacaaaggcaaggaggaagacagacagacagacagacagaggggggggggggagagagacccagcaggctaggtgagaattaaactgataagcattaataagcaataatcattccactctcacatcaggattctatattattcatagactaaggaccaaagagttttgcatttttctgtgtatatttctactttcttattaagcatcctatagctcttctcaaattatccttctatacaagcaagagcatgtaggagaaatccttattctctcctaagatgtcacaacatggtcctaacacattccgtaacacagctctgacatttcctcatgccatctgtgtttctgccaaatgaaaatgtcctatccctcaaagatcatgggacatattaaaggtcattcattgtttctctgaaaattcaaattctactatttttcctatttttatatattaaactttatctgatcactgttttccaaagtctcctgatgtcactctgtgccttctcttcagttggcagatgtcactctgtatcttctctgcagtttggcatgctagttgccaggcccctcctgctggcaagcacattctccaaaaatctcttccaaccacttcaaatatcctttcctctgaaaatatcccttattctcacaagtctattgaacattttcaacagtgggtaccctgcctgtttctccttctgaccatgagtgtttcaaggaactgtcaggcctagatgactcaataccttcttgcctagtatgtaggagatatatttgatgaatgaacaaaataatgaatttctttgtaattgaagttgctggtacctaacaaaaaccatataactcctatttccttctcaccagtgtgatctaacccttaaaacagtattttcaaatgccagggcatcccttagtgagcattcctttgcttggtttactggataaaaagcagcagcatgaaggagtgaagcagaatagtaagaggtcatgaaatggaaaacagacagtagtgtacacagtaatgttgtctctttcattaaataagtttatgtatccctgtgatgtatgtgtgtgcatgtgtatgtgtgtactatgtattgttgtatttgtgtatgttgcatatgtgtatttgtgttgtatatatgtatatgtatttgtatatatgtgttgtatatgtgtatgtgttctatgtgtttatgtgaatgtatgttgtatacagatatgtaattatatgcataaatgtgttgtatgtgtatgtatatggtataagggtgtgttctatatgtatatgtatgtattgaatatgtgtgtatctgtatatatgtgaatatatgcatacatgcactgtatatgtgcatatgtgtatttgttttatatatatatgtgtgtgtgtgtgtgtgtatttgttgtatttgtatgtgtatatgtatatttgtattttatatgtatgtcctatatgtatgtatagttatagatgtatgttttatatatttatgtgtgtgtgttaaagttctcactgaaagtatggatgatatattataaaagcccctgttgtcaagaatagcaggatgtgactagctgctgctttttattaagatttcctagacctcccttcaaagccctgaagtgtttctgctttccactattctaggtaggtcttccataatcttgtgtcaactgtacaaaccatctaccccacataagttctcttccttccccatcacagactcctaacttatgggttatattatccacatgatgtgttgtgctcaccctcttccacagtcttttcacttggccattccataggcccctctcctctctgctttcctaaagctcacatgtaagccaatatgtgttctcatgactacattagtcaacttactgtaactacagtcaaacagctgaagcagtctacttaacaataaagagttttatgtatttcaatattttggaaggttcaagagcatagcatgaactggcactgattcagttctaatgactttttcagctgtatcccatagtgacaacatgtagatgaagaagaaatcgtgtctgcaaacagaggacaggctccagctttcatagcaagtcatcctcatgagagtccgctctagaacaatcttcttatgaaggttgagtcctggtgatggagggctttcctttaggcctcacctcaagtgtgagacaagtttccatcacatggaccttggcagggcatctaacagataaagcaaaagacatcaccattcacaaattgcttcccatttaacactgggaagagtaggtggagatgaggagctgtactggtttttaaaaaatgaaagggattatttggaaagcacactaagacacctacccaattcgactcaagcattacaaatcctttatcacaagaaagctgaagcccaatccagagtccaccccttcctggtagcagctcagacactatgtgtccccaacactagttagtaaaaaacatttccatatgcaaatttttctcttcatccaggaagtgattctctaaggaactctttctgcatcctcctagctccagtgaatcctcaggagaaggagattgacctgactccacagtccggtcctaggactgtaagaaactagcctggcccctaggtcctcacagttaacctctcccactgagtcaatttaacagaacatttacaaggaactactcagaccacagtgggtcaaaatgaaataaaaaccgactttcatgggactggagtgatagctcagtagttacaaacactggctgctattgcagaggagctaagtttgttcccagcacccacctggagcctcacaactgtctatgactccagatccagaggatatattgtggcttccacagtgccaagcatgcatataaatatatgtgatggagatatcattctgtaaatatgtctctcttattggttgatgaataaaacactgttggccaataaagaatcaagataggccggactaggagacaaggaggattctgggaaatgtaataggaagtcaccatgtgatccctggaggagaggacttgtgagtctggtgttctcagtaagataagaccttgtagaaatacatatattagtagttatgtgttaatacttaagacagagctagctaataaaaagctctagacattgaccaacagcattatgactaatagaatctctgtgtattatttggggctgatgcggcactgggatcaggctggtgggaagagttatcataacatatatgcaagcaaacactgacacatataaaataaaaataaacaattttaactgacctgcaatctagaagagtatacaagaacattattcacaacacaaaattccaaatacatattcttctcagctaatgtgttcactacttatgtcctcctttgacatggcctcttcatgggctttagactgaaagtactaattctagaattatcccctgctttatgaagcattccaaagaatgcaaaaaagaaagaaggaaggaaggaaggaaggaaggaaggaaggaaggaaggatagaagaggaaggggaagggaagaagggagggaaggaggccaagtgagggagcaagggagataatattttccttaattcacctacaaaattgcctacaagccagatctatcttacagagaaggccctagggtcctgtactgtccaagtttttgtcactattatataatgactgtggtaattggtttaaggaagagaggttattttagctcatgatctaatggttacagttgaagatctgatagacccattgcagtgggcttctgggtatggtagcacataacaggaacatttggcagagagcaatcactcacctcgtgactcaggaaacagacacaaagcttctcaaagtcccctttgagaggaggggaggtgattcctctgtgtctcacttcttaatgtccactgcacctccctggggagcatgccctttacacttggaggccacttacacattcagtacccagtaaagcagttcattatagcatgcctccctctccacaatgagtaacaaacctacttattcaaccatacgcatcctagtggtctctgtctggaaggtgtcaacagttttatgagaatggcttacctactgttttcactgaagaaatactagggggcttgaataccagaagatttcttgcctttcacaaagtcaaaattatctgaattatgtagtgactgctgtttagaaagcaaagtaagaaattgattttacacctgctatattacaactgtcaagtttacacaaggggtattaggccaactgcagcctaaaggcccttttaattggtcatagttctcataggttcataaatgatgaatgtgttaaaacgctcgtcccagtactctgttgctgatgccaataagtggaaacaactggggaaaacacattttttgttttgttttgtaaatcacattgaaattctttacagagagagccagtgtcaatgtatttccaaacagagtgctatatactcatgttctgtttcatggatgccaaagctctctgattacatttacactctgcccaaggctagcctcattagttatgactaaaaatggcttgcttaccattgatgttcactgggaaaagaatccaagtaaatcctaaaagcaaatgtgttctttgtgcaaaaactcctacatattcttcatgaaaacacacacaaaatcaatttctagcttgtgttaactagttacttgtcttgttgctatgacaaaatacctgacaaaagtaccttaaagatggggtgtctaagtcccatgggactggtttccctccacccaatcgggtccctataactattaatctgtggatctccacatggccttttcttcctggagaaagcctggatgtcctaccttccagtatctacataccgtctgtcggacatcgagtcttacctttctttatccctatttggattttccgcctggctaaattctgcctatccattggctgaaacagctttatttatcaactagtaagagaaacatatatcagagcatataggagtacatcccccatcatctcctctcttctgtctcaataaaaaggagggttttaacatttttttggtttttcaagacatggtttctctgtggctttggagagtgtcacagaactagctcttgtagaccaggctagcatcgaactcacagaaataagcttgcctctacctcctgagtgctgggattaaaggcgtgcgccaccaccacccagctaagagttttaactttaacatagtaaaattatatataacaaaacagttatcaagcaagaattatagttgacaatatttagttcattaacatttggaaaaattcataaaaatattctatcatctatcctatctttgtgagtctaaagttttatatgtaacttatcttttatcataactaaggaaaaaccgtaaacacaactatctgtcttcaactccatcaaagacctcagaaggataatatataaactctagaattgacagagacatctcgctgcctagagtcacccaaagtttctctgtaatgttggggcatccatctttagcccataggccatagtgtctggcagactttttaatgaagtaggaaatttgaagatctgttttgtcttgtattggcaaggtttgtcagtttctttcttctgtaaagcaggaaccctgaaggaccatcctatatcttggcaagtacagcagtcactttcctttgtaacctgcttgtccagtttggactgcgtgcttactgccagcagttgaggcaaggacagttctttgcctaataggccagttttgccacattgaaggcaaactccataatgagtttctctgatatccatcttcctctatgatgtaattggtgttaccagaggcagttgtgcttcattgtcattaaaaaccctaataaaacattttaaatgccatattctgtaggtctttggaaggttttgaagaatacctatccatttgaaatacatctctgtatatctagaaaacctaactaccataagttttgactattataggtgattacaacatctatttacttatacattacgtttttaaataagctgtataaacacaataactaaacaagagtagaaaatatacatataacaaaactgaccttaaatctgtatccataaaacaaaatctataccaatgtatttattcctatattatattcccttttttctttagaaagagattgactgtgaccatcaaccaattataatcaaccctatttaattgaaaacaaacatttataaacaatatttgggaatttggatgtagttctccctaaactgtgtcctgctgtctggggtcactgtcagtcccatgctgatcctgaaaaaaaacccagaactgtggccaaatcctggctgtagtagtctgtgaggctacattgtctcagttattttggatgatggaccacctaggccattatttcagggggtcttgtttgatcaaaccatagcctggaaggaaaccataggtttttatcctctgtggaaacaaaagcagaatccttagatttaatttttgaagttatttattattattttattttattttagaggcactcatatttacatatccatccccccattcactcaccctcccatcctcccctgttcccaaccaaccccccaaccaatcccccaactcctccccagggacagtgaggccctccacggggaacctttaaaatccatcatatcatttgggagagggcctaggccctccttgctgtatcagggctgcaatagtatcctccatagggaatgggctcccaaagtccatttgtgctctaggggtaaagactggctccactgttagaggtcccatagactgtcttggcctcctagctggcactcacattcagagggcttggtttggtccaatgctgtttccccagctttgtgactagggtctccatgctctcagtaggtcaggtcaagtgtttctgcgggtttccccagcacagtcttggctccttggctcatccctcctccctctccacaactggattctaggagtatggttcagtgcttagctgtgggtgcctatttctgcttcaaacagttaagatatcatatatatatatatatatatatatatatatatatatatatatatatatcagcagtgtccagaataaaatgtctctctgtagtcaaaaagttaaagaaaacataataatttacatattctctctgtacattttccattttttacatggcttatattactttaattttttaggatctcattttgttagtgtaattctctagtcttcagatgatgactctaacatggggagacagagagctttttttcccccttctgtgcctaagcatacctgtaatccattcaattcacttataggaattctaagttcttgccctccatggactagtaaatgtaacagttcatgtttaataatcaagtagtactaaatgtctgctatgtggatccccttatcttatgcacaaggtatccaagcaaggtacacatgaagaaaccttaactaagtacatttccattacagactaaattggttccccatcccccaattcatatgaggaatgagggctagagagatggatgtgtgggtaagagcatttgttactcttgcagaggactggaaacttgttcccagcatccacatcaggcatctcacagcttccaggggacatgacatccatttctggcttctgcaggcacttgtgcatgtgtccacacacacacacagtttttaaagaaattttgtttgttaccattaaaacaatattagtagtaatctatcataaatttgaaagccagtgtcatgggtaattttttttttcctgatcagtgtagtatcccagcaaatctgaaaaccaaagctttttgaaatgctaaatggtttggtgtgacattatatattttcccttttttatcatctttctgttgaattgatgtgaagagttagaggaataaccccctgcaactccagatctccatttaaagctgtcttagtctgccttgcctttagctccttggaaagacaaatggcagaagctgaaagccatatattccatgctgctgtggctgttatggtttcactgagagcaatctgtcggacagccacatgcccttcaaaactgagttcccacaaactcagaattctctaaattaccctcacaatgactttcagataatgagttgctccatgttcccaccaggtatctcagaaaacctgaaaccatcggaatccatcattgatgcaaccacagatgatactccaagctgccattacttattgggtacttgcgcttccccaggtgctgtaccaaggattttgtatgtggaatcctgctttatcttctcaacacacttcatcacaagaaatgttcagtgattccctggaacccagtggccagccagccagccagggaggcaaatcagtagctttctctgcctacctcctgtatcagacaggaacaaatacagagacgcacagacagacaataccagagtgagagactgactgctcaacactcagcctttaacaggatgtctccatcaaatccctcccctcaagactcagggaaccctgcaaaagaggaggtgaaaacaatgcacctctcggaggacaccaaagaaacaaggccttttaaacacatcaggaccaacccacatatgaactcaaatactaaggcagcatgcacagagtctgcatgagtctacaccaaatggggccctacaactgaaaggagaagtggacacatgcccctatccctaacccagaagctatctccaattgataaccacttgcaaatggaaatttagtttcctccaaaggagtctcactggggaaaccaactactcttaagggtaggctgcgtgcccagcagtagacagccaaccaaaaatgaactcaatgtcatctgcatctttggaggttccttgcctcatgatgtcatgtcagggcttttccccctatagattttaagtgtacattacagcttcccagtcttgtttttttacaggattctgaagagtatgaatgagtgggtctctgtttctggtgccttttcttgaacccttttccttctgtttgtcttgtcctattcctacttatttgtttttgtttcatcttattttattttatcttattattatcctttagatgcctgttttccccctaaggagagacagaaagggggtggatacagatgggaggggagttggggagaaactggaaggagtagagggaagggaaaccataatcagaatatattgtatggaggcaaaagtctattttcaataaaagaaaaaaaaagaaacattgtgttgcaaatgggaaatattcaatcttcaaaacgtcttttatataaaagtaaaataatggactcatatactcaaaagggttgggatatggttaaacacatggctatttctacaatatacacaaagttatcgggactttctctctactctaaattgctcaattctcaggctaatccccatgttattgtgagatgaatactattagcttcatgttaacatcctatcaaataaaaaactgctgtagactgacctgtgtctcccaaatgctaagtcctaacccttacactgcaacaggacagatgggacctttaggggacaagatgaaatcataagagtcaggccctactctgatgatctgtgtcagaaatcagtaatagaggaccttgtccctctttctaccttataaggaaatggtgagaaggcagtcatcttcaagttagaaaggtcctcaccagaaaccaacgttcctggcttcttggtcttggacttctcagcttcttgagctctaggaaataaactttcattgcttaagcaacccggtattttgttacaccaaaacaacaggtgactaagacacaagcctaaagatgtttcccctaaaaccttaaaaaaaggtaacagcattgactctgaccattgacccaaacattttaacaaatgttaagaaacccaaattaccagttgttccttcagctggaacatgaagtcagccttaattcaattgtttgaaccaaagttaaagaaaggtattactttctttaataagaaagcaacaagaagaaggaataatgttactaaaaggaggggagaaaaacctatgcacagtaaacaaaacagcatctaggaaccttggatactctatgaggaaggtaccctcattcatccccatatgtaaatggactgagatcggagaaggttaagcaatgctgaaaagctccttcctgatagacctggggtagattcagtgcccaagtgtgaacttagagagattacgccattcatcaccagcttccttaacacggactgcagggctgtttgaaccctcttcataataagctcacttcccttcaccataatgaaatttacaatttctccagaagtcaaaatttatatttcttagaatgctaaataaataatgattatttttaataactgttatcaaaagattaaaaaccaaaatgccagccaaaacaaaaagaaaataacttttctggattgggtcagtggttcattcatcccaatagaatcttcagcaatccacgtgagatctaatttgccccttattatacaatcttaataagcacttctccaaatatgtcaggggctctttcatccatgaatacaaaaacatttccaaacccttaatagtccttggcttactattcattagaggaagtagtgtttcttacttgtcctaagcattttctaattattcaataatccatcaacttgaatttgtgtttctatgtctgaacccatccatcagtgcatggttgaataaccagaagccacatccctaaagaaaaatgactcttcctcacccagaagccatcaactaatcttagctcctgagttatgagtgagggcccataaaattacccctccacgttggaatgttgactggcttgatctagcacaggttctatgcaatttataaattcagatgctgtgagtccatgggttcggcaatcctgttatgtcccgagtacactgtctgttctggtccttatcctaagcattccttacttaagctgccaaagagcctgctctgtctctctggtgtttcagatttgtcagacagtatctattggtatccaaataagacttacaatggtcttttagataattgggcatttatctccctatacatccttctttttcccaggctaaatcttggacaattaagcctattattagtctatcctcatgaggaatccctcctaatagcatccaaaacaagcctccagtaggtggcactagactatctcagcattttggtccagatcacttactaacaccaatcactgaggggtgaaaggaactgtggcgacaacaaagtggcttggtaagtagtatgtaattgaagagatgcacagcctatggatttataaggaagctgtaatctaccatagagataacagcctggaatattcaggagacatgtcagacagttcagttttgagcactgcccaggtcaattaggtttattgcaatctgccttaagagcacaagtcaataaaaaaaaaaaaaaatctattccttataggaccatttgatggggatttttttgggtttgtttgtttttgttattgttgttgtttttgagacagggtttctctatgcaacagtcctggctgtcctggaactcactctgtagaccagactggtctcaaactcacagagatccacctacctctgcctcccaagtgctgggattaaaggtgtgcatcactaccactgggccttgatgaagatatttttaaagagaggggaaaaaataattaaaagttattaggttgtttaatgtctgtctatcaacaaggtaggtaaatgagttatttccagaataaagctttgttcattaatgtttaccagaaaatcacttaagtattttatcaaggatgacaacatatccttgtcatccttgataaaatatcctttgtctaaaaagcattccctctcttttacagtagtaaaattaaaagtgataattacagaattcatatggcaatgttaagattcagagacagtatagcatactgattctgggtgccaaatttgcagcttaacttggtgcttaactttaaactttaatatatttatatgtaaaataaagatgatgataattacattttggggagcaaaaatggataaatattgctttactcttaataatttctttgaatttttataattgatcattttaatagtgattactttctgtcataatatatagtcatatatattattaaagtttattatttaagtaaatttatttaaaatttggcaaatacctatctctacttgctaccaaccatttcaaagccctggggtaagcttaaaatttagaaagtgtttatatgcccaaacttcaggcaatgtatttaaaacacaaagcttctcacactttcatagaagtcgagcaaagccctaggaaccaattcctttctgaatagtttttatatacaaaaagaagtaaaagaattgcctcctcccaataccccactgctatggaaatataccaaacaaaatagggccaaaggaagtctctctaaggctcagttgctctgagttcttgactcatctttgtctcctaaatggactgttaacaagttcctggaactccctgcaccattggaaatgcagaccaagtcaccaaaaaaaatatactttgttcctcacttctgttttcaagcctgggcctgaggcccacagaagatttgagagtggtgcccttcttctgaatagcaaagcactctgtagcatgaagaaacaaagtgaaacattatgacattgtctaggcattcaaggagcacccagggcagccggaacagaagcattgccaggcttctatgtactccaatcaggtctatgtcattagtcacactgttcaacaaaagcaattttgacacattttagtgtaagttaaagaagcttttaatcaaaatataagcgctgcattttcagaacagggttgaatgcttgtctgcttcagaattgataattcactcccacccattcaacactcaatccatgtcattctgattattcgtctgattacctgcagccgatcagaagacccactttctcagggccctggacaacggtaaggagcgttaaacaactgctgaacactgctgctgaaactcattaatgttaatgatgtgtccttactgaatggcactttatgtttatttttcccataaaaaaagaaagctatgctatcagggtgtgagtgatttgactccctaactggcaattgttacagcctcactggtgcctggctgccttgagtaaaggacatcaatcagccaactggattttcctcaagtaaggactggctgttttaaacacctcactggtgctttgagaaagctacatagcgatcacagctgtttctgctgaacaatgactctagctcctgaagccatagccccggctgtgactatttcaaacaacctgcaccagactttttattgtcacaagtcttggtgaaattagaatgatactgtaattacttccacccagaccagaagaaaagcacttctcttgggtctattgtaactggtacaaagggaacaatgctgtgattggtatgaacacaatccttcatttgcatgaaggtctgctgtgattggtgcaaacattctgggcatacaagcagcaatctattcagctcattttgtgaggtggccaaaagacaccttcttgtattttcttactgatactgcaacattatgcctaataaaaggcttctctggggattttgttttggttttcgttgtttgtttgttttgcctacttttgttcttcatcatgcatagagcaggctgaggcggcaacacgcagaaaggaattatcaagagagaaagcaacagcaacatcagtggcaatagcagtggcaaagaacatagtaacagtagcagcagccctgccctggcagcagtagcagtcagtgcccatggcaacagtggtaagggacaactgaactattgccaaaaaagctcagagctgatagaccttaaggacccagagtctcagactccttatgttgtgaagctaacactactgctatcaaggacaaaggaactcgaaaaacaagggctgaaagcttttatgctgatgccatcaagagttggagaatcctggggcaggcacgataactcagaggataaaggcacttgctgtgcaagcctgatacaagcctgataagcagattttgttccccagaacccatataaaagtagaatgagagagccaacttcagttatcttcctgccctccacacaagcattctgtggcatgattgtgtgtgcacgcacaaaaagaataataacaatagaccttataactgcttaaaatttagaatctaaacatacaggcccaaatgttttaacactggcttctattcaaaaccagggaattctggtacctagacacaaaggctgtaatattagcatttgtccaaggctagaaaataccaaatcccatggcatgcacaagagttgctacgctaacatccacttctgttttgcttatgttttgtttttgttttttttttttgagatagggttttattatgtagcctcagatgttctggaattcactgtgtagaccagactgacctctgattcacagagatctataggggaaatgttatccacaccctctagggggctggcacaggtgactcagaccacgcacactagggcgtggtcactgacatagcaagaccttaaatatgagggtcgcacacaggcggctctctctgttacatggttcccctggtttagaggactgactcgtcctgtgagtgctttcctattaaaacatgtttgtcccaaacttggtctgactcctttgaggtacacaccccactttagagatccacctgccttgggggttaaaagcatgagccaccatacccagcttcagatagatagattcgatagatggacggacggatggacggacggacggacggacggacggacggacggacggacagacagacaaatagacagacatagatatatgatatagatatatagagatggctcctctaactgctgcttgcaatcactgctgccagaagttgaacatcaaaacattactaagcagtaaccctagaagtgaaagtatcctagaaaccagagtggcaatagtctaaggctcctacaaggctttggattaggatttcaaaagaaagctatacatgccttgcttacagctgtctaccttgtggtcagcacagtgtctggcaagcaaaattccaaataaagagggactgggtttctatgtagctgggtaggcaaaaaaatcatccttgtgtcttctgggagtcatcaggaagggtgctgatgagtcttggcttggaataattgagccatttcccagaatataaaacagtgagaggagttttctatcactcctactttctgggaacaaggcttttgagataaagttcaatattccaataaagtatgtagagcagttaacaccgagattaagagctcatagtaggaatgcttaagaaacaaaaatcaccatttagaatgagacaaaagacaaccttactttggttgccatcagcactcacttcctggcatgtctattgccaccaacacttctggtctggtacacgaagtccttgtaggcttccacagattagctgacactctagtgtcattttcctttttcatgctttacaactatcctttcgcacgctttctaatttttgtctatgcaatgtgctaaacctgtctacatttagagatacacctatcattggaatccattagcacagcttctaaattttctcagcagttggtactcatcaatttaccttctccataatagctcggcattagctgcagatgtggaagacttcgctaggcaatcctttccctgaatcatttataaggtattaaataagattggtgagggcaaatccctgaggactctaacagtgtttacccttttctttcctaacaaatgtgcatttccactcattttgcttcctgtctctaagccaattctacatctgtgacaaaatatccttacccatcctatggtgacaacagttcccattaagctgtactttggaggttttataaagcacaaagtgccactgggggactgcagtaattcatggtgtgctgatgtgacaccatcctcctcactgtgacatttaagaaccatttaacccaaaggttaaatattgtccccacagacattcaagcacaacagatgggcagcagatctgaggtgcaacacaatacttagatcccaaatctcaccaagaaaaacatgtcaagtaaggttagcctttagtttaacagaaggggtttcagagttcccatttttttggtttgaaaatgtatgtacttaggagtggtgcttccttccgagtactgctttggacatattttatagggatactggaggattctatgcaaactttaaggcctttataggcataaatcactatagcttagtttgcctctgagatgaatttggccagtattagttcttcactatctactaatgcatattcaatagctacttgatacacaggcttcccatgggagcttgcagactctggactgacatctggggagcttgcatgggactgaactaggccttctgcatgtgggtgacagttgtgtgacttggtcggtttgtgagggccctggcagggggatgaagattcatccctagtacatgatctggcttttttggaacccattccctatggtgggatgccttgctcagccttgatgcagcaggggaagggcttaatcctgcctcaacttgatgtaccaggttttgatgactcccatgggaggccttaccctttctagggaatggattggaagtggaaggaaagcagaaggagggaagggaggggaactatggttggtatgtaaaatgaattcaaaaaattaaaaaaataacacaggcttctctgttacccatagccctattgaaacacctctcaatcattaagcttctctcactgtgatgtaattgcttgcctatgaattctctcctgccagaatctatgtgtctatttgtagaatagaaagtgacgaatccacctctagatccttagagtctgagttataacagacacacactacataaatgagtgaatgaatgaatgaatgaatgcattaataaacaagctatacttgcacttgaaaaagaaagtataaagaaggcattttgaggcaaatgcctttgtgcttgagaatggcaagagcacatatctaggcaaaaacactcatttagtagtaagtttccaaccccatttctctgacccacatcagttaccctgacatcacttctcaggacatgagcaaaggctctcgtgtcagatctgtgttaaagctccctggccttcaatagcaaagcatcacaggctgtggggtgagctcaaacaaacacacttgtttcttgaaggtttggggggctggaagatcaagggtaggggagctaacaggcctggtcttctccaaggcttcgctccttggctcacagaaggctgccttctcactgtgccttcctatctttggtattttccttcatctttcaaaagtcatcaactctaatagattagagttccatcctgataaccccatttaaccctcatgacctctttaaatggtccatctccaatgaggcaacactgggggttagggcttccttgtgtaaatttgagggaacatatttcagttataacacttttctgctctccacccacagcctccaggtctaggctctgaaatgactttatcctttccctccaaggtcatgctcaatccaaaggagagctctcactttcagagaaattttactccatctgctttcattcactcaatgagcattatccactgtgtgtcaggaccttgagctatacccataaacaatagacacaaagatacctgctttcagtaaactgccatgatggggaaaagacaaaccatgagcataagaaagctttaagcacaccacaagaacagaaaagacattaagggaaaagtaagggagacacttcgcaatattaaatagcatcatccaagaaagcgtgaaactcagaccctttaatttgttgaacaagaggcccagggaacttcagcgagcccctgggtaggtattgactccactgctaggtgttcagtgcagaacaaatggggacaaaggtaaatacaaaggagttacctataggaaagataaggcatatgtttgacgtgcgtacaggtgtgcaaacaaacatggaatgttctaggtttctctaagttgaaggtaagttttcagtaacgtagcattttaaaaacctttgaggtgctggggagatggctcagtggataaaaatacttgctatgaaagcaaagggggcctgaaattagattcccaacaaccttatataagctgggcatggccagttgtgtttataatcccagaattgggagggtggagatgcgaagttggagatcttactggccagccagcctagacaaaacagtgagcttcaggttcattaagagtccctatttaaaaaaggggggggctagagaatgattgagaaaagtattcctctgggctctgcgtgggaacacttaggtaggttcaaccacacaaacacatgtatatcagccacacacacactggcacatacgatgtttgaaattatcttcccttaccttcttcaagcattttctttccagcttccctgatgcggccagttttgtgggactgattctctatctcagggtcattcactgcttcattttgaaggtagactgccctaagttagtaaaactacgcaagaaaatagtcactttggtaggactgttactgccagtgccttgcatgtggtggggaactattgaacaggaaccagtcgagcagaggccaggttatctcatttaacacctcttcatcttcacttcactagtcctccttcccacacctcctaaagctggactaaaggttagatagattgcttaatgtctatataccccaacctaccttttcttagagaattccccttagatctgctgtgcatttctttctcgtcccaactcaagaatttcagagccagctctctaaaataagattatcaaaaatcatctctcagtccctggggaaaggtagaaccctcacttagacaaacacaaatgtcctagccacatggatgaatgtcccttctaaaactctccaaacttgcactgcagccagggtgccacagcattcaacatccacttgccttctgttttaatggcattgactccaatctttccacattattgcactaatctggagactggtttaaaaacaaaaaaacaaaaacaaacaaaccttaaatcaaagtcttctttgtcttgggataatgagagatggtgtgtttgatacattagcagttactttactttcttgagtatgttaaaaccttagttcagatcctgtaggcagatgtgtctgtcccacaagctactcccaagtaaccacatggaagcttaatgctttgccatatggctcagtaccttctctcagtccagcatgcccatcttgcttctctatgcatctcctctgactccaccctccttttcccccagtgtccttagttttgttgtcctgccaacactttctgcctggctaggctaatcacctttttctttgatgggggcgggattttccagacagggtttctctatgtagctttggagtctatcctggcactcgctctggagaccaggcttgccttgaactcacagagatccgcctgcctctgcctccccgagtgctgggattaaaggcgtgtgccaccaatgcccagcttaaataaatattttcttccttgtaactccattgttttgacattagtatttaagattagtatccacacatctttcataataaaaatttgatggagaaaaacaaaggtgtttgtcttgagccatcactggctatagagaagatgggaaggttaatattagcagatatagctttggatcaggaagaaagttcattagaggaataattactgctgtttccttggctgcagcaggatacactggcctctagatagttattttgggatttttctatggaataatccctttgtacactgtgaagatttgtcagttggattggtttaataaaaaggtgaagccgggcgttggtggctttattcaggatggaaaaaaaaatcctgattcaggggactcttgccttgtgtatatgactttaaagttggttgaacctgaacatatgcagtaaattgatatttgataaaggtgccaagaacaaacaatgaagattatctattcaataagtgatgctgggacaactcggtatcacatgtagaagaataaaaataaaactttatgctgtatcatctgccaaaatcaactctaaatggattaagggcttaaatatgagacctaagaaatacaggggcaaagctctgtgactctggtgtaaacaatgcatttggagatgtgactcaaaagtataggaaacaaaaatagaactatgagcttatgtcaacccaaaaggcttatgcatagacaaggaaagaaccagaagcatgaagagtcgccctacagagtgggagaaagtcactaaaaatcttgtatctgataaagggttagcatccaaaacacatgaagatatcaaacaaatagcaagaaaagaaaaattccagcttaaaaatgggctatgaaccggattagacatttctcccactgaatgcctagaaatggccaatagtgcattggtggtgcacgcctttaatcccagcactcgggaggcagaggcaggtagatctctgtgagttcgagaccaggctggtctacaagagctagttccaggacagcctccaaaagccacagagaaaccctgtctcgaaaaacaaaaacaaaacaaaacaaaataaatggccaataggagttttgggtttttttgttttgttttggtttgatttggtttggttttggtttttgttttgttttgttttttggagatttttgttttttgagacagagtttctctgggtaacagctctggctgtcctggaactcactttgtacatcagactggcctcaaaatcagagattcacctgcctctgcctcccaagtgctgggatttaaggcatgtgccaccactgtctgacgacaataggttttaaaagtccctcagcatcactgtttaccagagccacactgagatatcactttatacctgtcagatggctttaggaaagcagtgctgacaaagggaaatcttgcttactgggacacagtgtgatcagcagtctcacactggatacatatccaaaggagatagcactgagagttgaaggttgtgaaagaactaagaagctgatcattctggaagcactaatgcctcactgcagataacctgatgggtaactaaaagcagaataaaacttcggcatttctgccttgggttcgtatctgtctccttcaccttaagtttcagaaccctgctgatgtgtgcacataatcatactaatcaattaaggcatattagcattagatgggttatcttcttcccataagactaacagccttgaaaaagagtgactaaggctttgttggcagatgctcaaatgtcagcttttacaatgtccttctccggatcccaggtttagctcctagaagtctttcgccatggcccaaaaccatataggaacatcagacaaagccttgcaaacagaccatctctcttcctgtgatgcaactgctccctctgagcagaagcaattatgtcatgggagtgtccccctgcaccccctcccccggacctcttagatcaatgtcttacgaagcagaagaagatgaccacctgaggcagcaatacactttacataagactgtgtgaccagaactgagataagggccaaccctcccataatctgaccgtgactgcttgactaaacttgactaaacatccttctggccttcctccctctcatatgtgatctcggagtgtgaagctggagttgaaacactcagtccctggtgtcttcccaatacaaactgattttaaatctgtttcctgcctttatccattactttttccatttgatttctggaccaagaggctcgatttaatttgttggaactccctgaggtcaagccttccatagtctgcaactccagtcacaaaatctgctatccaattgtcaccatgccaccactactattcacaaatagccaggataaacaatcaatataaggatccatccacagacaaatggctataaaaagaatggtgtgtggggcagggggggtggggggaggtgttggaatgtgatggaatgatattctgcctttttaggtgtgacaatactgatgagattagaggacaccatcctacttagtaaaataagtcaggcatagaaaaacatgtaccacatgatctcacttacatatggagtattataaaggcagacccacagaagcagggtatacaatgctggatcctaagagttacaagtggagcgttgtctgggtaaatactggtcaaagaacatacattttcaattccattggaggaacaatttcaatagacatgttggacgacatggagactacagctagcagtgggttagaaatgactgatctttgaggtagccaatatattgattgaattctctcagcaatttcactgtgtatttatgttttagtatgctacataggtgcagcaagatggctcagtgggcaaaggcctcccaactctagtgacctgtgtctgactctcagaattcatgtaaaagaaggagagaaccaactccacaaagttgtcctctgacctccacaggtacaccatgacacatataaccacagacatcacacacatgcatacacccacacacgtcatacacacacacacacacacaccaataatataaatgcatacgctatatagcatgtctacatttttcagaattgtaagtgaaatatgaatgaaataaatattttagcaataatgtgtgatgaatctagcttctagggtatcacattttattctcgtgaccttctatatcaagtttgatcagagatttaaaaccaaagatctgaccatttgggagcttcttactgtccatcagtatatggcagagtttggtcagaaacctaactaccataataatgtactaggcaagtgtgagcaccttaccagcttctaatcctaatcaaccactgacatttacccacaagacttaaatggctgtgcttgtgcaaattgctttggatcacttcacagcagcttcactagacattccacttgggatctccccaactgcaacattccacaattctgcagttcagctaacccatgtgcagaggctccttcccaagcctagaaacagttgcacaataatgaaaagcctccgcatctttcaatcttcattttgatgttgatcatttctatcaatagtagatatggaaactgaccaagtttttccaaagccagcaatccctatttcaaaggtactattaagcagtgttggcataattggtgttagtaaccatcggaactcagcacaaaggcccccagaagagtgtagtggatttgttctcttgcctccttatccaaaagaggctccccttgagcatgccacccgaaggctgtattgtctgagcagtggagctggtccactcccatctgctttacttgtccagagagaaaggctcttagtgctggctcctgctgctctttcccatggcaggtcctttctcttgcagcaggagctctgccactgcaggaggagaccagctggagacctgcaaatgggtttttaactctctttgggtacctggcagtaacaggtagaggtgcccacataaactgctagttaccatggcaacatgaagcagtttagacaagcaatgttaacaataactagcactactacatgggacaatctctctctctctctctctctctctctctctctctctctctctctctctctctctctctctctctctctcctttctctcctctctttctcttttggttttcaagacagagtttccctgtatatccctgcctgtcctggaactaactctgtagagcaggctggcctgaaactcagagacatccacctgcctttgcttcccaagttctgggattaaaggcatgtgccaccaccaccaagcctatttctccttcttaaggagtcaaaattccaactcagagtggtatttattttattgagcatttactgcaggccaagcactacactgctacaagtaaaagatgaataaaatagacaaaatgttgtctttctagagactggtagccttctaaaaggaaatattcaagttgcacagacctctgaaaacaagggaccactataaatactatcaatttgtaaaactcaatcttcatatattccattactaaacagcaaatgcggaagaggcttttcttatctgtcattcccttatctgcttaggaaagatcttctcacacaacagatgtaggcggactttctttcccaaccaccagttcccaaataacctacccagagatttaatatttattgtaattgcccggctgatagctcaggcttgtgactaggtaatacttacattttaaattaacccatatttcttaccatgggtctgccacatgactcctggcttattacctcattttttacactccctgctttctctgcatctgctggcatctcccaagaccctgcctttcttcttcccagcatcctcctagtctggctctcctggccaatctcttcccagacagctgtaggccagtcagctcattattacccagtggaagtgatacatatttacagtgtacaaagattgttccagagcagacagattagaattccacacctgtcacccggtccagacagaggtgaccacagctgaccccaacacctgtcaccaggtccaaacagaggtgatcagagctgacctaatgactgttacctaggaaacttgatctgaacaggacaacttttgttcacctgccacagcttgctgtcacccaccctgcaagtagtcgcaatccccctacttctaacccaaaatgctattaagccctggtttggccacacatactgaacatgaatggttcctatgtttggacacataatgaaatttgttatttttttcctgttaatctggctattttaaatttcttttataaactaaaattatcaaaacttcagatggaaatgagacaatttagcccttcccaaacaggtgtatacagaaatgggtgctaggcatagccaaggtaatacagacaaaaggtagaaagctgagatccaactgtcagaaatagaccttaactgacacatgttgatctgtgaaattccctgtacttaccacacacagttttcccacgggactcctttacctttctcagcttagatttaattgatgtggcatgggcaaggaaaggctctctaaaacacagaagtcagtaatgggaactcccaagggtctcacttcctctgaacagcacctggaaggcaagaacattaagtgttaattacgcctataaccatgatcaacccaaaagtacatgcacaagcccactgtttccacaatgctactgctgcccaggttaagttgtgggttttatattcaagtagataacatatttttcaggctcttgtgatttgaggaacatggagagtaaagcagaaaaaggtaagtttaccttgttttctgtgatgacatagtaagattagagtcatgatgttaaacctaagttcttaactcacttgagtcaaactttccaaaagcaacccagcctctgtcttcaaagcaatggaaaacaagtggcatgtttgctcttagttacctgctgtttatcttctaacatgggtgtacttttatccaagcgatgtgttaggtgatgtcccaaagcatgtttgacccacaggtcgcttcctgagccacatggtctctaattcttggcagagttatctttcttcacccagcatccagttgaggaggagacccagcttctttgaacctgctgtcaaagtgcctaccacaagcccaagttctacaagccatgctttctgaggcacactgcctcttctccccacacttcaccatggtgtccattctctgcctcgaggaacaagatcctcgattcagtttgggaataagtgtggtcctagtgtctgtgcaataaagacatcggcagagggatgaataaatgggttctaggaacagctctgccactcagtaacactaagtccttgaataaataaatcacttcctttccctgtgtctcatttctcacctgaaaagagaagagcagatatgacatgagacagtactgaatagcatgcaggcatgaaagtcaccttattcttaggagtgttttcaatgtttcttttatgtgtgctcatttgttctcagcaatggcacatctaaatataaatcaatccagaaaacttgacccaatctagctccttctatcagttcaggtttagatgtcatctccccaagtgtctcttctgtgagatacgagggagtccagctgtcccatctcatctcttccctgttctctccatctagcacacagaaattccagaggtgaagcaagaattagttatagctcttgtagatggtagaaagaagtgacactcttcgttgtctatcaaaaggatcacagataacaaacctagaatggaaggcaggtggataagagaaaagcatcatatgttttttattcaatgttctatttgccattagagcccagtgacccacaggaagccactgttatgctttgatttaaagagcaagcagcccatgtagaaatgtggttgtacagaaactggatcttcatgggggagtattaaggaggcctgttagcttcctttgacctgtgcatcattccccccaggtacccaggatctcttctgtaatgtggggcttgtgacctgcaagtcagacaaaaatttatctgtggcagggaagtggggaggttaagaggacagctctagattgtgtggcttaatccaggagttctggtttctatgtttgcctaagagaagaaagaagcagaagaaaaacaagagtttctggtatttagttgaagatttttgtttctgttctttttttttttttctgttgttctttaaggatactgctctgtaatttttttctactgtttttctgatctgttttctttcttctctaactttactatggccttctttttgttagttttggactccctttgcctttttttcctagttccttgaattgtaaacttagttttttatattttaatacaggcatgtattactataaaatttcctctcagaactatttctgtcaatcctatccatcgtcgtctgttgggtatcatttttttgtctttagaattcttaaatttctcttctaacttgattgttcaggagtatggtacttgtttccacatattggcgaatttttcacttcctcccccttattaacttctggatgtctgcccttgtgacaggaaaagatgtttgtaatattttagtttccttaggttggttaaaacttgttttgcaccataaaacaatacgatagatcctggaggatattctgtgtgcctgggaagaatatacattctacaggacagactgctccgtgtgtgtctgttaactgtatttagactaaagtacattccaagtagtgtgattatttttaatacttttgtcattttactttagtgaataaagtaaactgcagtatcaggatactatgaaaattagtgcatacttacctttgctcatgattttcatatgttttcctatcatgcactgtcttgtatagtacataactcatataactggcatctgagctcggagggttcccttatctctcatttcttgaggttgttttttttccaacattttgaatatattctcctgccctggtaaagtaggaaatcatgacagcaagtagtggaaaaaaacatgaccagctcctggtaggcagcgaacaggaggaggaagagccagcacaagacatgtgcccaaatcaccctccaaggctccaacttttaaagtgtctatgacttcctaatagtccattaagttatcaacccttaaacagaccaggccactcaagagttcagagccatcatgatgtaatagtctccaaaaggcctgtgtgttaggctatgttagggactgggccttcgatacacaagctttggggagacatttgaacacagtgagataagacagagactaaccatcaggaagtggatggctgcaccagggcacttccttccctccctcccgcagaaaaggactcagctctttcttttctcagttgtgcaaagctggtctggatgtaagggaatgagaacctcctttctctattgctaactgcaccaggagactgacaatcttggttattccaggcttatcatgaggtaaaacagaaaccagctcacagagacaccctgaagtgtggacaatgaaataccttatacttttttcctcccatgtggaacagcaatgttagttttacgttggctctcaattcagtgataccagctgtaaagggttcactctcctctccctttacccccagatgtcccaagggaaccaggttctcctggcagtcagacaagacagacattcatgttgcaaagcataccctgagagtccaaactgccatattcagtcactaacctaacagaccacccaacactcaaggaggcacaggctgaggccatctcagtactgagctaagccactttgggaaagtaagtaatgtggtaatgtaaaatttttttccacataaaacacagctgtttctgatctatatctttctagggtgcctctacctagttggattttgaatttcttttcaaggcatatttgtgctaatatcatggtttcattttgattttattttaagagacaaagtttcactctgtcacccaggatggtctggtacccaatctatgtagtatatgtggtccaggctggctttgaattcatggtaatctctctgttttagtcttctgagaactagaaatacagacatgagccaccaaacctggtatgatcttcataaaatgaacaaatgagaggtttgttttccaatactactatcttacttatacagtaagaacaaccaaaaatataataacagttacaataatagtaataataagaaggactggccattgtaagctttcataagttggcttttctcccctaaatggctacctgaaaattgtcagtgtctgaaacacaaggaaaatgcaacaagttgaaatgtttttgccatgaatccagagtatctaaaaggaactttggctgaatctttcaaactattaagggaaagaggcttgataaaggaagatagcaatggaggggctggaagataatgtttgaatggcctgggaggagtaagggaggaggagtaagagagggagggaggaaatgagggggtagggaaaaaggagaatgaagaagacaggggaaggagggaggggaggaagcaaaagggaaagggaaggaagaataattaggagaatcccacagactaagaaatggcaagattttaatgggtaaataagaataatgacaaaagtgacatgtggtctttagacctacaaacaaagcacattgttagaaattttgatcttaagaatgctatttttgaaagaaggactgtgtgtgtgtgtgtgtgtgtgtgtgtgtgtgtgtgtgtgtgtgtgtatagggggatggaccaggtatgtacattcgcataggtcaaaagaagttctcccacattgtccccttctgtcactctccacctattcccacgaggcagggtctctccctgcacctggggtttgtgggttttcagccaggctggaagctatcacatcctgaaccaataaatctttctgaaaagctgcctgagttctgcctgccatgtcattaagttcccaagtaactcatagaaatttatattagtttcaaaagctgcttgaccaatgactaagatttctcatctgctagctcagtcttaattattataaatctatatatttcataagacttatcttatagaggacaacttctgctggcatcttcttcctgggctcacatggtggatccacagagagaaggaggaagagaaaaaggaaggacttccttcttgcccttgcttatgtctccctgctatgtcacttcctgcctggatcacaacacttctttactacattttccagaatcttccttgactcctagtcccacctaacttgctcctcattggccaaacaatgctttattcaacaaccaataagaagataaacatacacagaaggacctcccccatcaacatctcagcaatcctgctgtctgtgtctcccggaggactacaggtattcacagggccatacctagcttgctatgtgagtgctgggccccaaagtgtctgatcctcataattgcacagcaagtgctcttagccaccgagccatttctctagccccaaagaatgccttcttggaacaaatatttactgagttaatcatcttaaagttgagccaagatggggcattttcctagaataacaaaccaaacatgttaaaccaaccacctaaaaacatggattaaaaataagcaaaggaatcatttgcgggtaagtgttaggaaataaatttttaaaaagagctttgtggaaaggaacaaaaattataagttggtctagtgttcttacaactatttttaagctgtaagcagtaaaatactaatacgaagtaaatctaaacaaatagtacacaaaatttaactcaccaaatttagagctgtacaatttatttcttagtaaccccttcaaactgtgtgatatattgttctacttataataaggactcaaaaatatatgtcaagcaaataaatgatgatacttaacacttccattttatccttcctaaatatcataattttatttcttctctcttaagccttttcttctgcaaaagaggaaagacatgtgattaaccacagactttatgattgatcagtttgacacacagaccactataaaaagaagaaattttaggaatcaccaatcatagttgtttcccaacaatgctacagtcttcggtcttgggacagggagtggtatgctcaggctcaatcagaataacagttttgctctgttgttttttgtgtgtggtgtgtgtgtgcatgtttatatgtgtaggcatatgttcatgcaggtccacatgtagagtccagaggttgatatcaagtaccttccttaatctctctttagcttaggtactgagacaggttctcttactttaacccagagtttaccaatccatctagtctagctagtcagcttgcttcaggatcctatctctgcctgccaagtcctgggcttccaggtgggccaccaatttacccagcatgtcctaggtgctggggattcaaggttcaatgctcaggcttagcagagaagtactctgtccactaagcaatctcctcagtctgaagaacagtttttacttgttttacatagtgagctttcatttcagaattaaaaaaaaagagggggggaacagtacctaagagattcaaggtaggatgaaacagtttttctaacattttccccaaagatcttgccaatacatcatcagctcctaatgtgagttgtttcttcattactcccacaagccttttccagttaaaaataccgactgaatgtcgtccagttgaattttaatttcagataagcaatgaaaaatcattagttgcatctcaaacacaactattcttgttcaattgtctaaagagaggaatccataaaccctcctagaatttgccttgaatgctagattgaacttaaaaggccaacccataaatcatactcttcagcaagctatcctaggttgatccaaactctagcagccattgtcctaacaaccctaagcacatagtagggtacaatgaaagctttccttgtgaaagaaacacttatgtgttccttcacacgttaagtccctgcatatagtgacaagttttagtagactaagtagatgtgcccatttagagctgatgagattaggtgtctcttgggaagttgtcacatttgtgctattgacatctggggccaattggatagtcaaagcattgatcaatcttcccttgacttgggcatcacactgcttaactttccaggaaaacacttcacttccatttctattcaataatgagctgttacaaattccatttgcaaagacagttttgtacatagaaatgcacaaatcaaaactcccttctttttttttatttaaatgagaaacaagcatgttttacatgtcaatcccagttccctctccctccccccctcccctggccccaactgaccccttatcccatcccctttctgctccccagggagcatgaggctttccatgggggaatcttcaccaaagctcccttcttgaagtacccacattcagacaggaaggcaagtatgaaacacataatctcctttggccttctctaagtacaccagcaccatccccttggtcgctcatggggctagcatctgatagagccccaggggatacatttctatattttattccagagagaacctacttttttcttcatggcttttcaaggtgacatcatatgctgactctctccctctctcattgagaaacatagttttcccccagttctctgagcagtccatgaatttggtgaaatattgaggtggaccacggagtagctattatcttgactattctgtacattgcatagaaaataccaccctgcttaatcagaatgtggaaatctgatgtgtatcatggcccatgctcataatcccggctacttaggaagctgagatatgaggaactcaaatttgaagccaccctaactgacttagcaagaccctgtctcaaaatgaaatctttaaaagggctagggatgtagctcactggtggaacactggtgccccaggccccgagtctgatctttcatgctgaaaacttaatctatttttttttaactaagcctctcttgtcaatatttcatgacctgttgctatttcacctttttgtttttactccattgtctgagcatttgacaacagcagtgatctatgagccttgacttgtctaccttgaagacaagtctacaggctatgtcaagcatggcactgggacagcttgcattttcaagtgcaattctgttaaaacatcaacaaaaattctcactgtaataaggtgaaatgtcaaaatgtacattttggcccagaagtgtcaacagggcagaagcatttggcagatggcctaataaataacaaccaggcattaattcatgctttttaggaatagcaacaacaataaagaaggatcttcagcttctaaggtctaagcttaatctaaagctacagaggcttgcttgggtacaaaggccagcatataaatgcaacattacaaacatacttacagtctgcatgccacagtagtaactctccaatggtggattgactaggaattaattcatccccaaacaaaaagagtgattaacagtggctttctagcttcataacaagttcagacctagacagtccctcactggcataataactgctcagagtatcacaaaaaagggacccctgtacttcctgcctctcctttctactatccttggttacagtggcctttgccctcacacttatcatctcagagacaatgatagctagtgctcctccaaagttcatgttctcaggaggatggggcaaggggaaaggaccagggacaaggtggaaaatgttctggtgtgagagctttgccattttatacaagggcttattttttacctatatggtgttagttatctctgcttacaaaaggggaaggcctggggtttgtggcttttacttttatcctagagttaggcaaaagagacaggaaattgcctatcacaaccatgtactttagatcaaaactggcccacagtattacccctacatgtctcttacatttgtaaggaatagtcatttacttatactaatgctggatgctagcctcagaattcttgaggtgatcacatttccaaatattctattgaataatacatgaacaatattatgcttcatttttatatggcctatttaatcaaaattagctagagagagacttgattgcttctagatcccagttcaggtaattgagcaacacttattttattttagccatactattttataaactggttactggaattatcctcagtagtgaaaacaaattaccttagctgaaaagaaacagcattgaagataattttgcctacctccccatatttttgccctatttggtgtgttacataaattagaattggtacagatggagagtcagaaaacaaggtctgtaaaacaattccagtataaaacgtgctttgtctccatctggtggatgatgttattgttgcaatgacagcaacagcttgctcctcccaatcccactcaatgacatggattagatatcttttctttccttctttccttcctccctccctccctccctctcctccctccctcactccccttcttttctgtttctttcctctaacatttgccagtgggttagaagaaactcagtcatttgggaactcaaagtaccaacccccccccccagtgaaacaaccacaaggttgaaagtggtctgtgtactgtaaagtaagaacatcgagtctttagagaaagaaattaaagataccagaaaatggaactatttcccatgctcttggatagtaggatcaacatagtaaaaatggcaatctttttttttgttgttgtttgtttctgtttttcaagacagggttactctgtgtagctttggagcctatcctggcattcgctctggagaccaagttggcctggaactcacagagatctgcctgcctctgcctcccgagtgctgggattaaaggcgagtgctaccaacgctcggcaaaatggcaatcttgccaaaaccaatctacagattcaatgaattcccatcaaaatcccaacacaattcacagatcttgaaagaacagtactcaacttcatatggaaaaacaaaaaaaccagaatagccaaaacaaccctgtacaataaaggaacttccggaggcagcaccatccctgacttcaagctctactctattatagagccatagtcccaaaacagcttggtattggcacaaaaagagataggttgatcaatggaatctaattgaaaaacctgatattaacccacacacctaggaacacctgatttttgacaaagacgctaaagttatacaatggaaaaaagaaagcatcttcaacaaatggtgctggcataacttgcggacttgtaaagattgctgatagattcatatctatcactatgcacaaaacttaagtccaaatgaatcaaagacctcaacataaattcagccacacttaacctcctacaggagacggtaggtggtaccctcgaatgaattggtaaaggagaccactttctgaacataacaccagtagctcaaacattgagattgacaattaataaatgggacctcctgaaactgagaagcttctgtaaggcaaaggacatagtcagcaagacaaaaatgccaacccacagaatggaaaaagatactcaccaaccccatatctgacagaggactgatttatcaaaatatacaatgaactcaagaagctagccacccctggacacatggggaagggcccaggaccaccacaggaagatttggtggactttgcagagccccctttgagggccctacctgcctggggagtggtgggcggatggagtgggggtaggctgggggtggaggagggatgggggtgaggggagggagagggagaagggacttacatgtgaaacaagcttgttccctaactagacctaataaataaattttaaaaaaagctagccaccaaaaaccaaacgatgcaatgaaaaagtggagtgcaaaactaaatagagaattctccacagaggaatcaaaaatagctaaaaggcacataaagtgctcaacatccttagccatcagggaaatgcaaatcaaaacaactctgagataccatcttattcctgtcaaaatggctaaaaatcaataacaccaatgacaatctatactggagaggatgtggaaaaagaggaacactcctccattgctggtgggagtacaaacttgtaaacccactttggaaatcagtatggcgattcctcaggaaaatgggtatcagtctaccacaagatccagcaattccactcttagacatataccaaaaagaagcacattcgtacaaggacattttgttcaactatgttcaactatgttcatagaagcattatttgtaatagccagaacctggaagccacctagatatccctcagctgaagaatggagaaaacatggtacatttaaacaatggagtgtaatttttttccactactcagtggaaaaaaacaatggaatcttgaaattcacaggcaaatggatggaactagaagaaaccatactgagtgaggtaacccagtcacaaaaagacaaacatggtatgtagtcactcatatatggtttttagtcatagacaaagattgccagtctacaatccacacttccagaggatctaggaaacaaggaagacccccaagagaagattgcatagtcccttgaagaaggggagggggacaagaacccctgagcaaagtgggagcaaggggggcagggagaaaggaggtgggaagggaacaaggggaggggggaggagaacaagaggactgagacaggggaggaatagaggagggcaagaaaagagatgccttatagagggagacactacaggtttggagagaggtctggcacaggggaaatgctaggggatccacagggatgaccccaacgaagaatccaggcagtgctgcagaggacgcctttgatgcccttcccctacaatgagattggtgtctaccttggttaccattcctagagccttaatccagtagctgttcaaagcagaaacaggcacccacagctaagcactgaaccatactcctagaatccagttgcagagagggagcagagatgagcaaagtggccaagactgtgctggagaaacccacagtaacagttgacctgactcactgagagcatggagaccctagtcacaaagctggggaaacagcattggaccaaaccaagccctctgaatgtgggtgccagctaggaggctaagacagtctatgggacctctaacagtgtagccaatctttattcctagagcacaaatggactttgggagcccattccctatggaggtatactattgcagcccagatacagcaaggaggtcctacctaggccctcccccaaatgatatgacagactttgaaggtcccctgtggagggcctcactatccctggggaggagttgggggatgggttgggggggttggttgggaacatgggaggatgggagggcaagggaatggggggatgggggatatgtaaatatgagtgcctctaaaaaaaattttaaaaaaaaagaaaaagaaaaaataaagaaagtggtctgtgtagataactcacatgatctcccaaaggcctcattacacccagagttgaaatcatcaagctgttgctagcaacacaagaagtctgacatgttgccctttctatggggcagcacagagatgcaaatacacagtcagacttgcccatgagcaaatctcaagcagtttcaatctgattttgtatctcacatgttcccaaacaactggtagtattttccacagaattctcaggtgcttatcaaagtgagtattcttttttcttgtaagtgtccacactcccttagggatgaagccctggagttgtacacttgccattcagatcctgccttttcctatttcttgaagtttattaaaacttgcttgctggagtcaacaagatggtccaatgggtaaaaatcctactgcagagccttacaagctgggtttttatctccagacaccaccgtgaagggaaagcttcgactcccagaagacttctctgacccctgtactcacacacatatgcacacaataataaaacagagttcttaaacttggtttatggaacctgcttctttctcaccttgctttttgccagctgactagagatatatttaatattggtgtatcagacaaacagatgataatgttgaggaaaaaacatatccaagatacataaaccattatcacttatatatcataagcattcatcctattctttttttatattctagaagacatttcaaatgaagctacagtcaaactagtcactatcatcaggacaattttgatcaatagtgactcagtcttcatcatgacatatgcattactataaaagtttatatttaaccatatacatgattttctattttaaaaaggtaactaagttttacttctggcattattagatagctctgaatcctctgagaacctgaagaaaattcaacacataccattaaattagtgaaaagacagatctaatcagtattaataacacacctaaatgctagagaactcatatccagaatgtagagaaccagggattcaaatagattgtaagggggctcgagagatgactcagttaagggcactggcttctcttctagggaaccaggtttgatgcccagcacacagatgacagttaacaactgtctgtaactcttccaatggatcagacaatcttttcaggtccctatggggactacacacatgcggtaacacagacatactatataggaaaaacatctatacatataacaataaacaataatttttttacgctagtaagagtttctaaaggctagctgtcatggggctggcaagatgggtcagtgtataaaagtacttgcctggcaagcctagtaccctatgttgattcccaaaagccatgtaaacgtggaaagaaaaactgacttcacagaaccatcctctcacctccacgtgtaccatggcacaggtggctctctctcacacacacacacacatcaagcatacacacactcacacactaattaaatgctaccagttgtatcagtaatcaaagcattacaaatcaaaactaaaatgcaaacatctgaaaaatctttcagaatatttaaaaccaaaggacaatactaacctaggctgagcaaatgccactcatatgttgtttttaacaaaacctcaattgttccatctttttcaataaagacacaggtgagagggagagaaggagggaggagggagagagggagggaaggagtgggcagggctaagagatttgtatttttgtatttttgtaattttgcattttgtattcttaggtagctttactccttgagctatgcacctccaaaccatacctatcactcactaaaggatctagttaaaaagcagatatttatcaagtaaactaaaagaggaccagcaattctgtatgtcttgaaaactcatagatgtttgaagtcagtgagatggctcagccagaagagccacttggtcccagggctaatgacatgacttccaattccaaggcgagaagcaacttcctagagttgttctaagagaggacatcctctctctctctctctctctctctctctctcatacacacacacacacacacacactgcaaggtaatgctgagccttagggcagagttttccaactacatcttatgaaaagattttgcaaattatcaaatattactaatggccattaaaagtttaatgatattttagtttgaaaaaatactgttgagccctttctcttgctttttgagaatttgctcttaaatgtaagtaccaaacacttgtttaataaaataaataaatagtaaatgtacagtatacaagctatacatcatgggtactgtcaatcctacctcttaattcagaaggcaatgtcaaaacatggcagcagagactgcttggtaatgaacacaagatgtttggcactgtcctggataagcaacacttagcaactggcgtctctgctggattgccaattgcagaggctggcaaattttctacatagggccagatggtaaatattttaagccttacagaccatagggtttctgtcataactacttagttctgccagtacatcacaaagctactacagacagcatgtatatgactgggtctagaaggggacctaacagatcccctagtctactatacatcatcagctaacaatatgtagtttgtctgaaattttccatatagttagttttaagaaaccatcttagttgggcatagcaatacatcgtgtgggaagctgagacaggacaggcaggaggacagtatgttccaatccaggctgttcgggctatatagtgatactctgcctcgagtaaaggaaaagagaggaaatgagaatggggaagagaagagctgagtggaaagggaacattgcaggaacagagatgggggaaaaatgagattaagttgtacctcaacagtgacttttttttggtgccttcatggatattcactgtcaaacaatttcataaatggtaatcaatgaactagaaccctaaaataaataatatatgaggtgacaacacaggggacatcttagtatatatataatatgtattctttagccacacactactgggatgctggcctgcctgccctatcatttcacaggattagcaaccattaatcagcatattgccaaactagcacagaaactttgtacatgaatttaaattccacatagaacttaattatgctaagcctgtgccacaaaatccatttattttacatggatttatatttttgatatgcatagaaagtatgaccaaaaacatcaaatgtagtaaaacttagccccagccattaacggtgtatgccattaatctcagtaggaagcaaaggtaggtggatctctatgagctggaggccagcctgatctaaagagtgagtttcaggacagccaggactatgctgagaaacaccatctcaaaaaaaaaaaaaaaaaaaaaaaaaaaaaaaaaaaaaccttcagccaactacagtccaaaaacaatccacttactggttactggttatactactttattgtacatacaaaattggctatgctaccttagtctcaggttcagaaacccaaaatgaaagctcacactcataaaagattagcttacctggctatctaaattagtttaatgagttacatgttttgaaaaactagagattttagtatgtgcaaaacactacattggagttaagatttgttcaaaagtgttggtcacctatgtttttgtaagtaatatttatattttattataaaataaaaggcttaaggaaaaaatcaaattaactagtaagaaaactttcactctatctctgtaccccattttatctgccctctactttggttctgccttgggcacccttcccagtgctgacagcagcattcttagcaagcagcgctgctccacctgaattttaaggagaacgctgattttgtttgcttcagaatgtttattttcccaaatcaaaaagtaaaatcaggttcctgagttgctactatgctcgatgcttcttactgggttcctacagtttccactttcccctactatgcaaggagtccacagccaaacttgtagtagaggtttcggttgtggggtacacccagccagcaccccggagtgggggacatgcaggctcctgtctgccctgcctcacactcctgacaaatgaggtcctgcacttacaagatcaagcagttcctggactgttcctggactcagagagacctatccctgtgcaagggcttcagtaaagccccaaagcaatgcaaatacagccatagtcagggttcccttgccctgaagagaagagtcttgctcttacccccaaccctcaccaatagccaaacatgatgagagggaacctgtgactgggaataaggagaggacttgtcatcccacagattaacatggcataaacatccaaacaaagagattactttagaccagtgtgtgtgtgtgtgtgtgtgtacctgctaccaagtgtaactcactatctgtgttcaagccccaggacccatgtagcaaaaggagaaggagagcatcaagttctatctagatccctactagtttgccctctgacctctatacgtgtgctatgtgagagtacacaagcaagcaagcacacacacacaataaagaaaaattttaagagccttataaagtatattgttgatacatttattgaattaaatatatatataaaatgccaatctatacagcagcatttaatgcataatatatacttttaaaacttacaatttacaatgattgtgaataaaaacttgacactgaaacagtctcccaaagcaatttatttagctgttcttgttcgaagtcgtcgtttgagaatctgatgatcactttctttcactttctgttccattaaaatctgaaattaacagtttttcaaatataggtaaaagtaatttgcttatgagtgatggtacaccattataattccatttttcatctcctaaataaatgcatgtcaaagaattacagattttgtaaaagattcattcagcattacctaagtcaagaattaaaacaacctatagtctgctgaatccaaggcagatctaagattgaaattactaaaatatttggacataaaatgcctcaaaccaattttaggaaatgaccattcacagcaataaggtctaacaaaagggggaagtacactatgctctagctcagcaaaaacaatctgtagacatagatatctttcttcagcaaagaggagaaactgtactactcagacggtaaaataagactaatagaacactacatgaaatagcatgttctaactctggcttatgacatcagccctagctttgttaactactattgcaaaagcgggtcactcttatttgtcttggccacttcctgttgaaatccattaattacgtttctacttacactttcatccactaagcaaatgagaacttcctgctttagctctcatgaggacaatgaatcagagtgacaacaacctccttttctttaaaaagcctaatggaagtcaggtgtgtgcacacatgccaacgatcccagccaggtgtgagagcacactacaatgagccagcaacagggaggctaaggcagaaggaacactaaaagtttgaggccactgtggatgacatagtgaaaacctttcccaaaagcacaaacaagactagagagccagctcttgcagaaaacttggttttggtttctaacacccacatggcagctcactaccctccagtatcaggggtttcagtgctctcttctggcattcaagggtactgcacacacggtgcatatttatacttacatatagacaaaatactcatacacatgaaataaaaataaattttaaacaagaagaaatcagaaacctagaaggaaggcttatagaagaaaggtaagagaaaacggtgaaatatcaattttatatttctattaggtacatggatccatatttgactcttgtaataatgataacacaagaatagctcttagaagtaaataaatcatttgttgtgttctattgatggaaatatattactctgatgaaacttcaactaccactgcataatacgtgtgtgtgtgtgtgtgtgtgtgtgtgtgtgtgtgtgtgtgtgtgtgtgtgtgtgtgtgtgtactactgtggtatttatatttagttactataaggctaatatatatctgggataaaaagtataacatctgtctaagagagctaaagagaagaaattaaaagcactcgagttgaaaaggtggcttagagattaagagcactggctgctctttcataggacctgggtacaattcccagcacccacatggcagctcaaacacatctgtaactccagtttcacaggatccaatacccttttatgacttccacaggtaccaggaattcatttggtacatagatatactgtaaccaaaacacccatacatgctaaaaattaaatgattttttaaaaataaattaaaatcataaaattcaaactgttacaaatacttgagaattaaaaagaaaatgtatagatttatactgataagaactaaaatattagcttaccacttggccagatatgttgatgggagatgaaatttcacttctgtataatttccgtttggctttttttggctgagacacattttctttacttacttctacagctgagaactttggagaactcattgtttcaattatcctttttgctgcaagcaaaaaaatgttaattcttgtgttaatttttctaatttttctaatttttcaaactaaggtttgaaattcttaatgaaaaaaaaatagaaatcaatcaagaagaaaaacagtgtactatacaaatggtgacaagacatgaatagataattgataaagaaacaaatccaattaacacttaacacagagaggggagaaaagcaaggaagcatcagtgaacccccagcatctgcaatgacttgggagtctacccagagcagggtctatctgtgggaagctgcattaaaagtaaggggtaaagccaggcatgacacaggtacctagattcctggcaggtgggagaatgaggcaagaggagcctgatttttcagtctagcctgggttagacaggaagacactgtctcaaaaactcaaaacactaaataaagcaaataaatatggtagattcactttgatactcgtgtatcaagacacccatgaagaatattcagtaacaacttaatcaccaatgctttatgcccatgaacaaacacatacactacatagttaacagtggacacattctaagaagtagactagatatttttaaatttctgttgagacacaaaaggcacagaaccaagaaagtttgacaacctctggttagcctccacaaagcactttctgttttgattcaactatgattctagtcgttccttctccatctcgcccacttctggtctccaatttatgctattgctaccactcaggaaatcccacaaaacctctttatactctcccccatctagaattacatgtacattttatagtgttctgtaatctaccagcattaaaactattccctgtagtgaatatgaacatacatatgtatataactcatagtacatattttaacagagatatgtaacatgtgcacattatagctcactgctcctccatggtctctgtatgagttcctgctttaacatccttcagtgatggactgtgatgtgaaatgttacgtcaataaacccttcctcaaattggtatgaatatatatatgtatatatatatatatatatcagttaatatttacaatactaacagtgattacctccaaagggtcaaatagtacaaccccacatttctatgcacacatcccatttccttcctaagtttctcaaagttccttcattattataattggctttctctgacctccaatactatccaaccactttattttacctctactatattcaacagcctgcttgatttacataggttacctaaatgtgagcctttctactccaatacatagtgaacacctaggaacatcgtcttttgtttttttttttttaggaacatcgtcttttcatctgatttttcccacagtatctaggaagacaatgcctgcctgctctaggcattagacttattaaactattaaatgtatatgcaactaggcaataggaagcactctacacttattaaaaaggtcacataatttttccacaaaccttttgattgaagaattgttggagaatgttgcaagaagtctccaaatttctgtagtgttccctctctttttttagaggctatgtttgcactagctgtaggtgcctggctccgtaaagagtatgttttcttagatgatggacataaagaaatctaaaaaaaacaaatactttctgtcactaataatgaaaaatgttacatggaaacagttatggccacagttaattaaaggaacttggaattaggtttgtggattaaaatcaaagggctaaccaatgacatgagtctgacagctagtgtaagtagatgtgaacacaagaagaagtaccactaaagggcaaatgctaaaggtatagtcaaatgttgattacagggattagaaattgaagagaaattgagttgcaattgacacaactgaattttggaaaactactactcaaaatttggtatcttacatctaagctcccactttatcatggaaacgacagaaataactggacctaggacaaaccttttgttcctttttgacagaggaatttctatgttctgaagcagggaggtgcacattatttctgggtgtagaatttttcttattttcacatttcaccaagtcctagaagtaataaattttggcactggttacttccttgatattaatttctttagactcaaaaagaatgtccgaaaatgctacattactaattaggataactgttcttgaacaaaggcagtgtgagaccaaaaaccagtagcaatgctggaactttttttaccaaacattttaagcttaaaacaggtaactttaaaagtaaatattaccatctattatgtaccttccacagaaagaaaaacatcaatatactactacagagagaactaaggatcagaagaaggctggtgtgactcaccacacaatgcggctaagatgcaatactaagtctggcagtcctactgccttctaagaagctgcactaacaagtggcaagagctttttttaccgaccatatgaaggtccaaatcctaataccagctgatggaaaaagaattttccaagacttaagattttagttcagtaacaaagacactgatcaagcaattttgtcatttcaatttctctcatttctttatcaaacatttcccatcccactggggataatgtaactagtttggtacaaactggtatactaaaataagtgtctggtaaaattcatcattatctgacctactccagatgaaatgaagtaaagaatgaactaataaaagcacagctttctgaggactatgaagttcctgtatcatccctacaggagagaaaatattccgtaagttgtgtacatgagtctctagaatgagttctgaacagaagagggcagcagacttaactacagctaagcctattaacaacatttgcttgctaaatttacccatcaggcaactatacctcctccatttcattactcttcctcttccgtgccttgggaatcttaattgtgaccggtgtaggacaaccagggtgcttcactgccattttgtttggctgcaaaggtgtaaactgaatctctaattcaggttttggaaatcgagtgctttgtacattttctgttgacacttcacaagagtcgagaattacagatccatcctacaacaaaataaaaatgggagaaagggttatttatctttgtaacacagatttagaaatggcaaaaaaaaaattttcaaatgctgttcaagacgatgacttgagaaagaaaaagggctgtgctagacaacagcaaggacagaagactgacatatctatactctccagagtatgcatggtgtattaaaatagtgaaaaatagggtcagagtatagaccaaggacctggtttcactccctagtatcaacaaataaattggaggcaacttaagtgatcagcattacccaaagttttaccatcctaagagctttatatttaaaggattatggaccttatcacaaacccgccaagtcagaaacctccaaggaagaatttggtattttaaacaagcaccccaattacaatagatttaactctagcaacaaattcttcgtgactttttccatttaggaaaggagtctttcattctccttccctttagtggtttccatggctaccagaggtgatagaaaaacaccatggttctctaaagtgcaatcactggaagcactgtcacattctatcctgctcccttacccccttgggatgctttcaggacactttccctattgaaaaggtcccaaacctaaatcgagccacctactatgagaagctcaggcaacagtcagaggtcacacatgcatctttttcattatcactacgcaaaataagtcacatggcctttcggcctaacacaaacagtaaaaaacacaccacagagaaagccaaatttgattccttcaaaaccatgaagacaatacctgctagaattatcaataggaaactggaaccaagagattttaagacattgtatataaatttatgggggaagaaatgttcatcatatctgaccagaaagagaagagcaggaggaatagaagagggttgtaaaggaggaggggaagaacaaagtataatgatatctgcatagaaatgccactacaaaaaacaaattagaacaggggataaaggagcaggggaggaggagagggagagggaattgggattgacatgtaaaagaagcttgtttctaataaaaagaaaaaattaaagcttgctgcatggggctgaggaaatgactcagtggttaagagcacttgttctttcatagggctcaggtttcatctccagaacccacatggtgcctctcaactgtaactcccattctaggggatccgatatcctcttctgacctctgtgggcactgggcatgcacatggtacacagacatacatgcagacaaaatacccatacacataaaataaaaaaaaaatctaaaaaaaactttctgtattgatcaacttcaaactatttcataaactatctgtaccagtcactaaaatcaagactagaatgttattttccctgcatctctcccattctctatttcctttctgttcacctgtaagcacagcacgataccgtgttctaccccacaacatcccaggcaaaacacaaagctcccatcgggaatcacactactctacaataggaacttgtctccaatattcccacctccttgcagatggcaatcatgtctatttatgtttgtgccctcagtgtttagcaaaattctcaatgttgagtagcctcaataaatgtttaaaaataaattgaaataattaaaatattttaggtggcacagagtatttatgtatttagtaatccaatctgaggaattctgtcttaaacacaaaaccctaaacccaacacaaacgtaataatttcatgtggctattaaatgttggtgtagttattttttttttaagatatatttatttattatgaatacagccttttacctgcatgtattcctgcacaccagaagagggcaccagatctcattacaaatgattggaaaccaccatgtggttgctgggaattgaaatcaggacctctggaagagcagccagtgctcttaacctctgagccatctctccaacaccggtggtagttattataatggatagaatttcaaaagaaagtactatgaaaaaaatattgacctttattttatcttttacaggatattctattttctgaccatcaataacactttaaagaggaagtaaaagccagtaagcttggtcaccactgcctataaggtggaagaagagaatcaacttcgacaagttgttctctgacctccacatgtaccgtgtggcaagcatactgcccacccaaaaatggctttaagaaactaaactaagtaaatataaatgtagtttagaggtcaatttctcaagcgcctctaaatttccttcacacagctgagcatatacacagctaaatatgtagcaaggtacctgtaaaacttggtaacattaaaccttcaaatgcttatgattaataccaggtaaagagagcaaatactggttatattgctgaataccaacctctgctgcattcctagacatttcaaaactggttgattgaggttcagtttcaactccaccaagatcaaaagaaccattatgttcaggcttgagattcatggtttggttttcctgaagaaagaaaattcatttttaataagaaaataaacacctaacacagaatgattaaaaaggacttgcacagagtaattattagaaatgcacacttcaataaaaaacttctccttccttcaacattttcatctttagactagggaaaggctgggcaacttactagcctcttgtgagatttgaaagactgacctcacttgcctcttacttgtcataactgtctggttaagcctgcaagaatcatttttagctggacatagtggtaaatgattataatcagcattcagaaaactaggcaggaggatcatgagttcaaaatcatagtaagacactgactcaagtcacaaaaggcaaaaaacaaagaacaggactggtagagtggctcagcagataaaaattaaagcaactcagtctcaaaacccgaatttaatcactggaagccatgttggaaggaaaagaactgagaccccaatgttatcttcggacctatgcagtgtcatgtctacatgtcctttattttctaaacagagtgacacacctagctatgttaaaagacacaatcagaacttagctggaacttgaatgctaattttgataaaaataattcttgataaactataggtgggttatcagggtggcttagcaagttaagactcataccatcaagcagaggcaggtatatctctatgagttccaggacagctagagctaaaataagactacttcaattttttctttattaaaaattaaatttaattaagggtgggtccaattattcaagtgacaccaaaactttatgctaaaccacattcctacaatttcaagacagactaagataatcctaaatcgtagacttttgaattactttaatttgggaattacgaacaaactattaagagaaagtgttaagttttgaccattgataaatcaactataataataaactctgaaaattcaaaaaacatgaaaaacatctaaaatgttcaagcttttgaatcttttgggacgtactgagtaaatacttgggaaataatttcaacaagaaggtatagagagagttacagtgcactgaccatccctgcgctctctacagcagtcctttttagctgctggatttcctcatccttatgcttgttactggagagcagcgccttcatctgcgcctccacagctgtgaccagctggtcccgctcctctctccacttttgaaggtcatcagttttctctgccagctgtgctgtcagtgtttcctagtcaacaagcacaaacgatactgaaatacaatcacatgggcatgaaaatgctagaatagaaccctgttaccttatttcctaacttaaaaaattaattaaaaattttaacataatctttataatgaatctaagaatgttataaattttttattaaatataacatggtgaatatagaatatactatgcattcatgtatggacgaaatgcttacaaaatacaaaataacattttatctattaaatattcattttatctattaaatacacacctttaatcctaacactcacactcaggaggcataagcaagcagatctctgtgactccctggccagcctggtctacatagttccaggcagccagagctacatagtgagaccctgactcaaaataaatgaatgtcctcatgtcacatttgtccttagcccaccttcaaaagaatcagattactggcaatttctttcaataaataattatagccatagcattttatataacattatttccaacaacattcaaataagagaagaataaaattacagtaaaacaaatgacacacctcacagttattaaacatagaaatgaaataaggagctaaagagacagctcagcagttaagagcactggttgctcttctacaggaggtgggtttaatccccagaactcatggggtagctcagaatcaggggatccaagacactctctggcctctgcaggtaccaagcacagacatacagtacacagatatacatgaagaacaaccatactcataaaataaaaatagtaaaaacaatttaattagaagaaaaaaatgaacatttaaaatgaacatttaaagtaatttgtagtgggttcaagtaagtatgaaagattgtgtcaaattaaagaaaatctaaacatggaaactgctagcatttccagggacaaaactggagacagtgggagcagctctcattaagagggaagtcaacactatttccttattgcaaaggaaatagaaatctttgcagaacagaaaaaggcctttccttccagtgagagcgaatacagggagacgagggccagagccacagcttaaaatagcctcagacactgcactgtaccttctatagcaagcactttaaagaagagaaaaaggagtcaaaagtcctgtggaaagtatcaatggcatcagcaaaggaagggaggcagtgctaaaaccttctcctcttattgccacacaaccaaagcaataacaaaagaaccagttttcaaaagccctgtaagtccacattttggccactataggccccctctgaactataatctgggaaccagaacaactgtcacaagctacgcactgaaacagggcttataggacaagaaaagaaactttgaatcaggaagacacagaatccagcaaggtagaaatgtagtctgaatcaccatctacagtggaatacagatggcagttaggggactccaacctcaaggaccactgaggaatgtgaccagtatcaaccaacttatccaaaggtatgaggagatcaggaacttagccatcgaaggatcatcaaggaggacaataaaagatcacctagaagcatgaacaggatctgctgcacagcctgtgaaggacagctcagccatacaactgtcatctgcaagctgggggaacctacagttcagactagaattagtatcagacaagatcatgacacttgaaggaatgcaaattaaaactactttgagattttatcttatctttgtcaaaatggcatgtataaggccttaaggtcaattcccgatacacggacggacagacaggtaagtttccaaactcaatgatacacctcaaggtcttagcaaaactaaggccaggagatggctcagcaggtttgctacacctcatgacctgaatgcaaactccaaaatctatatcatagaagtagggagtggatgccttcaagatgttttgacttccacacatgagctatggcatgtgtgagcacgcatgcactcgcgcgctctcacacacacaaacaaacacacacacacacacacacacacacacacacacacacacacacacacacaccatgcaattacacatattcaccaaataaataaaatataattaaaaaataaaagaagttatttccttgttggaaagaaagaagtggtaggagggagaaaggaagagagggtggaaaaaacaagagggagaaaaggggtgccaaatgcaacctgagttgacaacataaacaagattgacaaacccgtaagtaactaaccaaactagagggaaaaaaacacaaattcaaaagagaaaattctaaaatgaaaaggtaggtaatgcaatagacatcaatgaaatagaattactaaggcatactttgaaaaactatattgtaaattggaaaatatgtaaatggaaacattttcagatacctaagaaataaaacaataaaaacaaattaaaaaataaatataagaagtatataataaacaatcagagttaagcaataataagaagtttcccaactaaaaactcccaagcccaggtggattcaaagttgaattgtaacagaactttttataagaactcacacttaggggctggagagatgctcagcagttacggcacctgctgatgtgacagagccccagattccattcccaggactgacatggtggctcactactatcactaactgcagtctaagggatctgttaccctcttctgactccacaggtaacaaacacctgtggagcacatacagacatccaggcaaagcaaacacacacacacaaaacaaaaatattttaactacatgtatgtgtgtatgcctgagtacaggtacctcagggagggagttatgagctggggacttgaactcacattctctgcaagagcagtatgtgccctaatggctaagctatctctccagccttcataaacctagaaagaaagccagaaagagagacaggcagacagacagagcacatttgtataccaatgctccttaaactatccatagaacagaaagaggaggaatgctgtcaaacttatttacaaagccagcattacactcacatcaaaccaaacaaggacacgggggaagaaaattatagaaccatctccttggtgaacatggatgcagaaattctaagtaaaaaatttataatccaaattttactacacatcaaaaagattgtttaccattaccagataggatcagttccagggataaaagagtagattatcatatgaaaatcaacaaatgcaataaatcacactaatagacacagagatcacatgactacctcaacagattcagaaaaaaaacctctgacaaagttcaaccttcacgataaaaatcaggaataaaaggatcataccttagcacaacaagccacatgataaacctatagccaacactatattaagtggtagaaatacaaaacatttctgatataacaaagagggagacaatggtatccactttctccactcctactcaacataagactagactttgtagtgcaatatgccaaaataaatagatgaaaataggaaaagaagaagccaaactattcctattagtgaacaatatgattctgtacataaaaactttacagaaaagtcttagaactaatcaacattttgagctaaatagcaacatacaaaatgaacaaaagtcagtggcttctgaatataccaataataaatatactaaaaaaaaagaaaccagaaaaacaattccattcacaatggctttaacaaaaaaacaaaatgcctaaaaggaaagctaataaaggaagtgaaagccctctgcaatgaaaattccaaaacaccaaagaaagaaactaaagaagacacgagaacacaaaaagatctgtgtccaagtgtcagcagaattaatatagtaaaatgcccaaatcaccaaaaataattccgtttcaatccaatttccatcaaattccaatgatactcttcacaaataggaaaaaaaaaaaaaacaaaaaaaaaacatcatcaatcctaaaattcacattgaactacaaaatattccagataactaaagcaatcctgagcaaaagaataatactggagacatcacaatctaaagtcatatcacaaagccaacataaaaaacagcatgatactggcatagcaacaaacatgtatttccacagggaatagaaaggagaacacaaaacaaacatacttaaactcacacagctacaaagtccttaattttcaacaaagatatcaaaatacaatggacaaagacatggtgctgggaaatctggaccgcaaaacacagaatagaaatgcaaagttcctatctctctcaccatgcacaaaaacaaaagtggaccaaaagtcctgaagctctgaaactgttggagaaaaacactacaaaataagcaatcggcaaagtctttctccattagctcagaaaatatcaagaactgacaaaagggattacaaaaagtaaaaagcttctatacgattaaggaagtaataaagtgaagagagaatataatcgtagctagctatacatctgacaagaggattactatctagctataaaaaactcaaagtattaaacaccaaaataaataaataaataaaaattaaacaagccccacttgagctcatgagacacaaagttcagtaaagatgaaatatagatgaccagtaaacatgacaattgctaaatatccttaacaaccagggaaatacaatcaggcatttcccaagtggcaaaatgaagtgagaaaagctaggaaaacacaagagtgaatgtcatggtcaaatggggagcaggaatatcttacaaaaggacaacctgctcacaaaaagaattagagcaactttaagaaacctaggggaaatatgaaatatatttaagaaccattgctactaaccacttcactctgtagctttaagcagcgctccctgtcttcagcatattttttcatctctctgtttcgtagattctcagcttctttggcttgagaggtaaggattcctttttcttctaaccacttctttctatcagctttatatttctcttcagattcctgagtaaagatgataaaagttattttcacatggcaaagtagtaatttttggttaatattgtcacacaatccatccactttcacctttaaataaaaaaacatcaaacaagtgggttttttggtaaataaggacaatatcaacttaatttcagattttaaaaagaaatgttaactggccttactttcacgtataaaacagtattttgctatgaaattccttcatcaatgagcctaagtcaaactaaacaactgacatttctgtaagagttacagtgactcaaatattcctacgggggggggggggggtgtaagcacctggtctgtgtcacttaaaaatgtatagttccaaaaattaaacacaaaatgacaaataacttgtataattattaaaggaacattcagaatagaggttctgaatagatatataaaagtgattttcacactgaattctatagatatttgtgctcatggcaatctaattttagacactgaaaatctaatgaaaactctaaaaccaaaacagcactccatatcagaattaaagtttgcaagatagccgattacaataattcagaaaaatgcaaacatcaacaatcttaatatggctgaaataactctataatctatatttaattagtcaaagaaaagttatttttcctgttattctcagtaaataatacagagcacatgcctttaatcctagcacctggaaggcagaggcagatggacctctgtgagttcaaggccagcctggtctacatagtaagttccaagatggcctgctctacatagtgagaccctgtgtcaaataggaaaaaacaaaacaaaacaacaatctaaaaaaaaaaaaaaaaaaccttagatacaaaactaagcatggaggcacatatactcccataatcccagcatctgggggatagaggcaataagatcaaagttcaaggtcatcaaacataaattgagtttcacactagcctctggtagttgttaaatcccatggaaaacgcattagttccccaaataatgtattctacatatagtacattaaacctgaacaagggtgtacataaatataaaattaatcctcttatgtatcatattttcatgtttcaatgtttagatatatagcttccatttgataatcaaacatggggaaagttaccaatcaaataaatctcccaatggctgtcttcttcagagcaatattttctaggtaagaaatggagttgaaaatagatacaaagacagcaaaagcagtaacttaaaaaattacatatacactgtcagggagtgggcttagtaggtaaaactactagctgcaagagcctgtcacctcaaagatagacctagaacccatgctttaaaatatacatggtggcgtccatccatctggaatcccagcactctatggcaaaatgggagaggcagaggtagaagaattactagacgttaatgaaccaacaggcctgaagatgctgcttagcagcagaaacaagagattctgcctcaacaactcctgaaagctgtcctcagacttccacacatgctgtggtacaaaagcacacacacaagcagataatcacacacagttaattacacatataagacatgaaattgaggacacaatcacagtgatttcactgactcataataaattatgtcttgggaattccccaggatatttccaaattgtgttcaaagtttcttctctacattaataatcaccatgtattatttcacccacaaaactagaaataaaatacaaaatgctgagttctcttacagaaatacaatggacagaaaggagggagagagagaaatgatacctgcagctcgtcctgaagcttactgatcttcttcctaagtatgtctgtgtcatcttcggggtcttcgtttgccctgtgattacttctagtttccagatctttgaatttttctttccatgtatccaattctaatttaaagtagatacaatgttatgaatgtagcaattatacatgaagaaggaagaaaggaagggagggaatgaaaatcagcagagcccaaaatacagaccaaggtggttctaaaattattctgaaagctgaactttaagcagtctcaccaaattctttaagattaccttatttgtttatatgtacatacatagtactatatatctcacaaggaagtccgaagagggcatcggatcctttggacctagagttactgatggtggtaagtcaccacatgagttttgggaaccaaacctgggtcgtctacaatggccaaacatgttcttaatctctgagttatctctgcagctaccctcaccattccttagtgaagacaaactacagggatttctcatgtgcccaaagattactgttccaagtactgagaataaattattttaatctgaaattacatgatacaattcttgaagtgctaaagaaaaagtcctatctatgaaaatgtctagaaaagtatgaagaacttcatccaattacatttcatatcatagcactaacatccaatcacaaataggccatatatcacagtcctcatcaagagcacttcagatgcaaataattaggctaactaagcaaatgcacaaaactatatgtaaaaaataccatagaagtaagtacatacatttcttcccttttgtaccagactataactagcttaattaaatattgtaacttcctacacacgttagaaaaattgatgctgttgacagcaatggatcagtacttactgagataaacaaattaatgctaaaagcttgcagacacaaatcaatcaaagcttgttttttcttcatagatgtgttttttatttgatgtagatgagtgtttgtctacatatgtgtatgtgctccatgtacatgcctgctgcccacggaaattaaaagaggtactggaactgaaggtagagccaccatgttagtgtagggaactggacctagatgccctgaaagagctacaagtgttcttaatcactgagtcttctctctaccccatgatgcagtattcttatttctttatgatatataaccttactcagaaaacaataattttcatcacagtggaaaagatgtgtcaaaaattatgaattattataaactctacactacttttgaaaaggaagaaatccaagaagattaaaacaagaaagtatgttttgagatgcagtctcattttacctttggctagccaatcagcttcctctaacttagcctcaagcactcggtcttgttctacctgagtttgctcttgctcttctaatgtcaatctcatgtgttcaatcaccttctcttttacacttagatctaaatgtttgagaaaaaaacaaaaactattgttaatagttcaattcgaaatatcacaaagaaccaaataattttaataaaacaatttagaaaatgtgtacactgaaaatcatacaaaaataatgaaacttaagacctaaataaatacaaaggtatatccagcattaattaaagagtttgttaactatcaatcttcccagttagaacagctttaacacaatcactactaaaattactcatggcttttatgtagaagtgaacagaatgatcctaaaattcatgtggcaatgcacagcacctaaaggagccaaaacatttttgcaaatgaaacacaaaaatggggggacccacacttcccaattttaaaacacatcacaatgtttccataacagtgacatgctagcatgaagataaatagatcaaaaatcagaattgaatgaccagataacaaattatcacatttacagttattcttcaacaaaggtacaaagataatatagtaagagaaagaacaggaaggtgcccccgaccctgcaagctcagggattactgcagaatcggcagagtgacatcatgtcaaagacgtgcaaaaccaagtcagagctaataccagcatgcagagggaaatgggacagagtcccaaacacagctgagaagctattggcaaccgttaacctgctgggaaaggaaaggtcagttttctctgagagggcagcccctgctaaagcagccttgctccagtggaaggccacaaactggtaaggggttggggatgagggggaaggagggaggaagggtgggaaggagggagagagagagagagagagagagagagaagttgcgtgggacaggaaaggtaaggtgaatctgaaaaatgggaggagggtgaaaatgatcaaaatatatggtttgaaattatcaaagaattagtaaaaatatttttaaagtgtacagaccattaccaagaaatcagtgttgcactgaatatgtattacttattgtttttctaataatcaattttaattttaaaagttattcagcagaatgctttttacctttgataacatctttggataccatcatttgaacattttaaagaaaaaagttaactgttattgcaactatttaacagtcaatttagttctagaaagaggaacttggttctgacctttgcatactctctcatactgctgtaccgtttcttccattttctgattatttaactgctcctataaaattcaaaaatacaattaaaggcacataaatcaatacttaacagcagttaatagtaggtgttgaaacagtccaggaatggagtcctgtgaggagaatgtcaaaccagtgcttgtgaaaatactccaaaaaacaagacaagaatattgagacctgtttcttcaaaacataaattgtttttgaaatatgtgttttgtgcacctctcgggtgggctaacttcagattactcattattgcgttctgtttttattcaattaaatgtttaaactatctttaatatgtctatatagaaaaaacatggttctgtcatgtatggcttgttcttgtgattatatatacagcttgaactcatcagttactcatgtgatcattcttaatcctcagaccataaattgtctgatgctctgaataaagttgactaatgcataagactttagtccacctcattcactggctccattctcccaggacccacaacttctagagcagtgaacaagtagacattaatagaacctaggtgtgccgggacatgcatttaatctctgtgagttcaaggccaggcagccaaggctatatagtgagacacagtcaagttctgtctgaaaaaaaaaacaaaaaacaaaaaacagaaaacagggctagagagatggctctgaggttaagagaactggctgctcttccagaggtccccaagttcaatttctagcagtcacatggcagcttacacctgtctgtaactccacttctaaggcttctgacactgtcacacagatacacatgcaggcaaaacaccaataaatataaaataaaagtaaattattaaaaaaaaaaaaaaacagaaaccaaaactagtaagatgggtcagtgagcagggcacttgccaacccagaggagcctgagttccttccctggtgcccacagagtggaagaagtcatctcacaagctgctctctgacctccttatatgcagtggggatacacgcaccatgacacatgtgcaaccatgcactgaatcacataaacacattcacatatgcataaaaatagacaacaatcatctcatgctttcattatcagttatgacgatccttatacctactcaggattttacaggaatgtgttctcacatatcataagatgcaaaagcaagtataatggaagtacaatgtatactgattataagaaaaaattttagtgtccccattatgaaacataaaatgtagaaaacgtttaagagtcctctatctaaaaagcagttatacagtttgaaaaaagtatcaagagtcttaaggggaaaagttcaatcacaattctaactttaacctgccagtcaccaagactacactctccaatctcttatccattcatcacaatctctacaatctactttaggatggatcactacagatcaggctggactgcctggatcaaaataaaacaaaacatacaattgtatgttagtagagtctggtggcttgtgcctataatcctcatgcttgagaggtgatgactgaaggacttgctatgaggtcaaggtcaatctaggctacaaagtaacatcctatctcaaagcaacaaaacaagacaaattttaatataataaacacgttttatcaggcaataaaatctaacagcagaatggatttcaagcatcattaacaacgtaactgctaccttgagctgctggatcgtccgctgtttcatatctatttcctgagaatactggtttttctttttctccagttcattaattttaatccgcaatgatttctcttcatctcgcattacagatacctacagagcgaaatttataaagcaaattgaacatttttacactttttgctgtgtttaaaatttatgaccatatcttcaagaatcatgcatgacctttaatcccatcagaaaaaacaagacactgctaaaggtacatacattactacattactaagtggcaaagttcagcctttttttttttctatttctgttctaagcatcctttccctaacattttgagctcccttactccttctttagagtcccttctccccagcaagtggcttcctgtgacacatggcttaactcaagcagtattattttcaccccttttcttctctaaaagctgccaagatgtacagcttgcctgctgaggaaggaagggggagggggaagagaggcaaggggagggaagaggggagggagggttcttatgatgttttcaattttcttttttcttcttttcttttctttctttcttttttttccctccaagacagggtttctctgtggagcctagctatcttggaactcactctgcagaccaaggtggccttcaactaagagatccacctacctctgtcttccaaatgttgggattaaaggtgtgtgcaccatgcccaacaagatatttcaattttcataggaagatacaagggggaaatacagagcaaagaaaaactagacagcaagaaaataattggctacatgtactaccttcaagaaacataactaggagaaatggaatagacttttttccctccctaaattttctttgtcgatatgttagtttacagctacacaacacagaaggtgccaaacctcatccaaattaaattataatggaaaacttgttgtaagtcactctgtatatcctaaatagcaagtacaaacaaaaaatactttatttttagagaaactcctatatcaaaagcatatatatttctacacacacaaacacaaacacacgtacaaacctttgagcggtgaaatgtttattacctgcagcaggcaaggatcatacccaaagccacatccacatattgttcttctctctaaccttcagtttatttaagttagctgcattttcccttgtaaattaatggcattcatcattttaagaaacattcaagttcacagatttcagtttaatcttaaaatctacacctaaacttaaacctaagggagaaaaatctataccacactaaattgtccacaagacttttcatataacctacctctttctgtacctgctcaatctgctttttggcatcagtgagtttctctttcagctcagcataatcttcttccttcctctgaagatctgcttggagatccagagtaagaagagagtttgcagcaagttcctcttttaatctaaaaagaaaacagaatcacaaagtacttctcaggcaacattggctgcttagatcactatgtgaaatagcaacaagtgttgcagaactacatcttttcacaatgtagaatgtgtaagctagcagtgagtacttcagacagcagcatctagggtctcaggagtataacctttacatacaacttttgtttctaaaggtttatgtgaaccaagttcaagtgcctcactcatcatatatgctattctgtagggaaaaatcctgattaagaggtactgctgaccacgaccacttggtcttggtcagagttacataacaaggatttaagaaagagggaggcgcatatgtcgctctctttcacctggctgagctgactaggaagcattttcagggtccgtcctgctctggtgcaaacctgggtcactggcccccttgaccgagtactgttccccaataaactaccatttatcaacctatctctgactccactttgtaatcatctatagtattctatcaaattaattgacatccatctaactgttcaaaaattacgtagaaaaaatgaatgcctggaaccagcaagatgacttagtgaatagaggtgcttgctgccaagcctcatgacctgaattcaattcctgggccccacatgttacagggaagggactatctcccacaggttattctttgacctctgcaaatatgtgcatatgcacaaagacacatgggcacaaacacacacacacacacaaaatgtgaaatattttacatactttagatagtttaaataaaacttagctcacttttctgtttcttgtctgctagtttgtctttcttcttcctttaactggagtgactgtttcatatcatgcaaattatttgtcaaccgtgtgatttcttcttccaacttgatttctttttcattgaaatctttggtgcttttgatgtgatcctggtgatttgcttcaaattccttcaaacttgcttctagctttaagatggcagattctttttctaaaatgccttgctctaattcagctaagcggctacactcatctttctgggtctctactatcatttcaagttcctttatttttgccttatagcatgcaacatcctgggttagctctgaaagagcttgctctctttcggacaaaagctgtacttgaacacagagaccaacacttttttcttgcagttcttctctgagctgatgtataagactttctttttctttcagctggtgatctttttgcttatcctcactctcctttgctcgtagttcattgttctcatccctgtagccttttacttccacctgtaatttttcaatttgctcttccagttcctgaatctgatgagactttttggaggaggccttcacaatctctttacattcttcccaaatggcttcaatactagagtggaaggaactttccctacagagctcttgaatatgacagtcttttacccagttgcttgacaagtcactacctgaaagctgtagtgatgtgttcagcaaattatcccctttaggaccacttgacagatcctggagattaagtaaatctatttttgaaatatgagaagatgaatcaagtgaccttagttcatctatttttgtttgcattagttttatctgtgaaacattgtttgtgatgcttcttgtagcagtttccatctcctgtgacaatttgaggatcctctcctcctgctctttgttcacagctttctgcatctgtaactcagcaactgcactgtcataattggcctgcatttgctccacctttgtcctaagagacaagttcttttcttcagcaaaacaaagctgctgctgcaaactcacaacctgttcattcaattctgctttttccactttttcacttttgagttcattctcaccaataattaaaagccttttgagctcttcattcttttcttgtaaaactctaatgccttctccaccttctgaaacaggctgctgcattacttcacttttcttttgatcttcggtgatgcatggactaccaagtataagacctttaagagaacattggtactattaatattagtctagcaaaacataagaaagcaacagttgcatataaactgaaagagcaagctctttcagagctaacccaggatgttgcatgctataaggcaaaaataaaggaacttgaaatgatagtagagacccagaaagatgagtgtagccacttagctgaattagagcaaggcattttagaaaaagaatctgccatcttaaagctagaagcaagtttgaaggaatttgaagcaaatcaccaggatcacaacatttgcaacactagaaacatcaaacctctaatgaaaaaactgaaaagaacttttaaaagaaaacatacacaatttaatccacttaaacaaaaagtatagcttcaggtctgagttgaccaaagagatctagcaaaataatggccattacttctgagtactcactttctagtatttatcatttaacttaattccacggacctttatctaactttatgagacaggacagagggcagggaattatggtgacattctagcaaccaactataacctaaagaacagttttaaattacagttacaatgttcctgactcacaaattgagcagctcattaaatttcttcatagataaaagcagaagggggttgaaactctcaaaagtcatataaaacatacggcctcatctttcactaactcatgaaagaactgctgactgattatttcctcagatgggaacaggaagctaatggctattgtgttgtaggtataaagatcaaggtaagtcctgtgctgtagagcagctattaacagaatcttgaaacatgcagagggctcaactaatcaaacatgaatgcaaggcatgtttgcaggcttaatatctacatttctagggtaaagataactctgctggcccttatcctaagactagtgctaacaggctccaatgagagataaagtgtttgtcacaaaagcatgagggctcaagatcaatccccacaaccaaggaaaaaagagttacgtctctagccctgtattataatgagattcaggatctgtcactggaacctgaacctgtaggtggagtttttagtcaggactcccagccaattctgtcctgtcaggtggtttgcaaataaccacagagacttaatattaattacaaatgcttggccgatagcttaggcttgccactaacttgctcttacaacttaaattaacctatttctgctaatctatgtgctgtcctgaggctcattaaactccataaactttccatgttgcttcttcctcttgggtcacaactcctctgactgccctccttccaagcattctctctgctccgaaaaccctgcctagctatctgccaatcagcgttttatcaacaatgagggtaacacattttcgaagaaggaatattccacagcatcattgattagggtagactgactagtctgtgagtcccagacactcacttttctaaaccttcccagtgctgggatttcatgtgtatgccatcatgcaaagtgcaaagtgagagaaaagaatctaccctcattctatgcatgaacacagtcagtttcccccaataccatttgttaatgaagctgagaataaataggagaaatctgggagtgagaagaggaggagaggtgacctccagggccagctaagaaaagctggctagaaataagccaagctaagcccaggcattcataagtaagaataagcctccatgtatttatttgggagctgggtggcagaccccaaaagactaagagtaaaaaacaaccagtaacagattagatcatggtatctacgttttcctaaaacctgttcttactcagtttatttcctgcttgtgaggcacccctgcaggcaacggaagtgctaatacctttttttgctggtggttcaccttgctcaagtccgtcttcatttaatcttttcctttctgaatgtgtctgggtaatgctgttcttgggcattgcaactgtttcattacaagttgatttattgctgattaaagatgtatctacctaaaacaaaacaattaaaatagttttaatgcagaaagctacagcaaacatggggactacaaatattacctgtcattggtctattttcaaatttgatgaaacactttgcaagttgtttctttagtttcactctaagataactgaggactctggcaacagaaaacctttagagataaatatcactaagtcatactcaaaacattatgtgcttcagatgcaatgggaaaagcttatattgccagctacataggagaatgtaggaggactgctcctatacgcaatttcaagaccagttggtcaacacagtgaaatcttgtctttaaaaaactaagtaaaacaaacaaaccctaaagaccaaagtgtgctctgaaatgaagtacttacagaatattacacacatacccttttattaatctatttccaatagcctagcatggtaattggtagatggtagatggtagttttacctgaaagaaatcagttttggtttctcacccttatgcttccaccttattaaatggggttatttcccccagaaaaggttcaaagtcagcaaaatagagtaacatatgaaatacttaaatacacagctacggatataataccgagtgaggtacccataactatgtatcaaaatattaaagcccacccagcctggagtatgcctcagtggtaggatgtatgaagttcttggttccagccttaaaaataaagtaacgcctcatgttcagataatccagggaatggtgacaggtactgaatataccgttctgtcaagatataaagtcaccttgagaggcagaggcagatggatctctgtgagttcaaggctcgcatagtccatgaagcaagttccaggaccgctagggctgttacacagagaaaccctgtctcaaaaaacaaacaaacaaaaaaaaaacaaaaacaaaaaattcttaccaagacaaagtaaagcttacattaccttacttgatgccttcagctcttgaacaaaagagtctgatcctgtgaagataaagaatattaataaaaaattttaagcatctaaaattaaaaagagcactgaatgaaacatgggctactaaattacattaaattcataaaaagaattttggcagtaataatattaaattacaagatgatattgtttcagaaatagccactttcaaaactttgagcaaacttataggcatagctacatagtagaaacacagtagtgtcacatacagtagtgcctgtctggtcaacttcataagacaccacggacttgccattttccagctctcttctttcatataataaaatgtggagcatgtcacctctggttgaatttccattcatctgctctcattttgagatgtcttctctaatagtaagtaaatgttttaaactatttatttagttgttttttatttcttgtgtgtgtgtgtgtgtgcacgtatgcacacacctgtgcatcatgtacacctgtgcacctgaagaagacagactcaacctcaagtgtccatccttaggcaccaccactgttctttttcagacagtctctaactgggacttgtgttcaactaagctaggctggctagtcacaagttccaaggacctgtctctgtccacatccccaatgctgggattataaacacatgccaccacaccaagcttgttttgtataaggtctgggaatcaaactcaggtcttgatagcaccaactttactaacctatctgccaaccctcagaaaatggcatagtggctcatgccagtcaacccagcactcaagaggctacataggcaggcagatctctgtgagttccaggacagctggggtggttacacagaaaaatcctgtctcggaaaaaaacaaaacaaaacaaaacaaaacaaaacaaaaaccaaaaacatatatgtgctcagacatacatacataccactttttgtagtaaatcatattacaaatgataaaagtgttaagatttgttaattagcttaaaatattttctagtcactaagataaaaaagatgcacaaatctctatactctagttataccctagtttttatgtatttatataatccaaatatagataaaatacatgcacttaccacactctctactttttagctcttcttgggctttagttaattcttctttagtttgggctaattccgctttaacttgattaaactttagttgcaaacaagcaatagcttcctgaggatcagcaagagacgtaatatataaatgagcaagttcagcctgtttcttaatatcagtgacatcatcttgaagagaatcaataacatcttcaactcctatataattacacgcttcctaaaaatagcaaaaaccacatgtctaacattaacagtggacttcactacatgtggtaatactctaacagactacaaacagcaaaaattcacaatttaaaattctttaaattacatgaatccccccaattatacaaaatttgtttcactattcatcttctaaaaacagaatgtgaagcctgtttcctcatatcataaattttagtaagttattactgaataattttgattacctagttcaagtacaccttcaatcatacagattcttatgtggcatttcacagtaattcaagaaaagtaacctccatcttcataccaaagtccacatcacaaaccatgtatacattacaacacaatggaatggcagtgagagcctgaagatctctgtcccagaccactgaatccacaaagcacatacccagaggaaaccaaaacaatccctccaaaaacccttatgagcttgtgggagcagcaaaaattaactttccttgaggtaaacaacagtgcttttctaacaaaggcaagcccttttatacataaatacatgtttctgttttgatcagaacaagtgaccctttaagggtccctttacatctttaatttttttcataaattgtaagacatttctgaatggagtataatccaagaaaaatgacttgtcactgcctacaagtaaaacaatgactcaagaaaaactgatatggaaacaaatgccacaaaaaaaacaaaaaaaaaaacttttacaaaaccaaagttccatttaaactgtttgcgtctagcaaggtacacaggcctcactgattatttttaatattttcattaacatacttcagttccaactttcatggcacaaattctatttgttggctcatcttcggtgtcacatattccaaccaaatctttgaagattgccaggcgacgttcagcattttcttctaatgcctctcgttcctgaagaagtgtctccctttaaaagagattatttccactaagagagcaatttagatagtcatatgtaatatctatctatataaggaagtcatcacattcagaagtcacctaatataaattaagaaatggctataaaacaaacagataaatctcaattcttaccaggtcatgaagataacttacttaaaatcggcttcacgttgagtccaatacttagtgaactcctgtgtaacttcttctcgaattttaaattccaatgttaacttttcctttttttcatttattagtctttttttcaagtcttctattaaatccaacagtttctaaaataagcatatatgctttataggaaagagtccaagagaaatatagagtgttcaaagagagctattatagtttagtcgattataatcgtgtcctttctaatggtgctaatagtcttattaaaattataaaattatagagattccttaacctgaaaattcaagtgtgcctctctacatctgagaaacaagcctgtacaagaaaatataaacatgcacgcctttaatcccagcactcgggaggtagaggcaggtggatctctgtgagttcaaggccagcctagtctccagagcgagtgccaagataggctccaaagctacacagagaaaccctgtctcgaaaaacccaaaaaaaaaaaaaaaaaaaaagaaagaaagaaaatataaacagatctgtctagccaactgtactgaaaaaaaattatttattatctactaagaactgtttggtagagttatgttttatttcattctatctatacaactccatgacttgctagcaccacatttcctaagcagggaacataaggaccaactctataggaaatgctaaaggctgggttcaagtgtcctagtcactgggcatggtaataatccatgactttaatcctagcactcagaagaggcaggtggatctctgcaaattccaggtcagactgagctgctacacagtgaaactgtatataaaaccagaaaaagtgtcctgttaaggaaagggatatgagtcaccatggcacaagctcacactcacacagaccacacacacacacacacacacacacacacacacacacacacacacacacagacagacagacagacagacagacagacacacacacacacacacacacacacacacacacacacacacacacacacacacacacacacacacacacacacgatataacttcacatgggattcaggagcaagaggatggtgtcaattctgagaacagtgtgttctaagcctccagggccccacagcaaaaccctatcccaaagcccaaatcagaggggtggactgaaacatgtatttgtaaaatatcatatactcattttgaattaaaaatcccaggcacccacataataagctaagcacatgtatgtaaattccagcagtggtagggaaacaggcagatccctacaaataaagaatctattccacaaagttgttctctgaccctatacacacacacacaccacatctgatatcgatctctgacctctagtgcaccttcacaaacacacaaaaagagggcagggcctccagaatgaagcccaacttcagaaaaataagccaagcagagttcttaacgcataccttgttgttctgacttttgaaggctctacagtcctctaacgttttatctatatcttcatcagtaagttcagtttccatgttttgtgtttcttcatttttttctaaatcctcaatcaaatcttcgttttcaaccagatcttctagactattttcccatgaagcagaggttctttttacatttagtattttactatccaaattattgtctaatactacatcttgagaagatctgatggacccaaaagatttctcttgagaagaactgaaagtatctggaacatacacctgttaaaatatccaaggtggcttttacaaggggaaaggcgaaacttcttcactggaagttattttttgagacaggttctcactgtatagtaccaccctgcctggaactcacagactacctgcctctgcctccgaactgctggggttataggcaccatctcacccaacccaatcaatcacactgtagcatttatctaattattctttaccaataaaaacttgagagtcagatattggggtaagaacctgaattatcagagaagcatggagaatcaaccagtgacctcctctctttctatgcaaacatttaaaaaagggaattggcactgctaaattaactttctgggaagaatagtctatgtgcaatctacaggtcaacatgccttcctgcattctctagcaaaggctttctgatgaccatcacttataagccagatgaacttcaaagtgacaattcatttcaaaactgccatgttgtataatttatccttatgattaatacttagtattcaatgtcattttacttcttttggggataatattaaattttttctatatctatgtctagttagttaaaaactacaattttatcttcaaatatttcctaggcttagagtaaaacacgaaatattacttatttcacagaaccattacccaggcacaaacaagggaacacacttatagtttcacactgaaaaaggcaaggcaaggcagtggtgacacacacctttaatcccagcactctggaggcaaaggcagaggcaggcagatctctgtgagtttgaggccagcttagtctacaaaatgagttccaggacagctagtgctgttacacagaaaaaccctgtcttgaaaagaaaaaaaaaaaaaaaaaaaaccaatcaacttgctctttcaaggacagtggttaatgttctatgagatgttcatacatttagcagcaacccaaatacatttaccttttgtgcaatggttgagaacttcaatacattgagtgtttcatcataagcagaacaacactgactaatattgatgatcatacatattttccctttgccattgaaaaaactttggaaatagtgggtcagtttactttcccggaaaggcacatgctgttgaaacctatgaaaaattcgaaaacacagcaagttaaaaggtttggaatatggatcagtattagagctcttgtctagcatggaccaggcccaaaactgaatctcagtaataaagaaacaaatacttcagtgaggtcactaataaaatttacttaattacttgcccttgtaatagtcttactcttttttaagaaatagtaagaataatacaataatctactaggtaaaatgtttaaaaaaaaaaaagtcacatttaactgtactgtattccccataataatagtaattctatggcacatatcataaaactccttaactaaagttgtgaaggctaattaatttttcatttaatcagcttaagaagataattaatacagtagactgtcacaaatgcacacaatatattgcttaagaataaagaagttacaagactggggtatagctcagctgacagagtggttacctagcacacacacaaggccaagtttgctctacagcaccacatgagggagaagtgtgatggtgcacatctgtaatcccacttgggaagtagaagcaggaagaccccatgttcagggttatcctcagtacatactgaattcaaggctagcctgggctacatgagaccatgtctcaaaaacacataagccaagaagtttgagacactaaatcaacatcacagagatgtgctttctaaactatgagtatatctgttgtggaaaatagtcaatacaatcattgtgaaagaaacagcttttcaaaaaggacttaaaagagcaaactttaatgattttgatatttatagtaatgatacttactttgacttttcactgttcctcaaaacactgatacactttcccagagtcaataaagaagcgttgatattcccagcctctcttagcctttcaccttcactttgtgtcttcatgcttcgttctgaaccagcaagatcacataaagacaatctaaatcaaccccccccaaaaaaggttactgtaaaatttttcaaaatgcttcaaaataactacaggttaaacagctttcaacttactcactaactcgagttacacgaggcatttcggagtcttcaatctgtaatattctaatagtgaatatgctgtgactgaaagaagaaacagagatcatgtattatcactccatttcaaggcatgcattctacaggagacaggcacctaatggacttctttacacaggtttaatctgtcctctaccagggatacattttgcaactagctgccagatattcagcccctactccattgtcacctacacatgcccaactgtctagcatcaccttataacttgtcaaatcccaaacccctcaaaacttcccctcctagcactccaatttctattaacaaaatcatgtgtaataaagagtcaatacttgtgaggagaaagcaaacaatctaaagttcaaggtcagcctagactactaagtgataccctatttaaaaatgaaacataaacactggcacaggagaccacttcctaaatataacaccagtagcaacaattaataaatgggacctcctgaaactgaaagacaaaggacacaatcaacaagacaaaatggcaaccaacagaatgggaaaagatcttcaccattcccacatctgactgggggctgatttccaaaatatacaaagaactcaagaaactagacatcaaactaccaaataatccaattaaaaagtggggtacagatataagcagagaattctcaacaaaagaatctcaaatggctgaaagacatttaaggaagtgctcaacatccttagccatcagggaaatgcaaatcaaaacaactctgagattccatcttacagctgtcagaatggctaagaataaaaacagtgatgacaacttaagaggatatggagaaaggggaacactcctcaattgctggtgagagtgcaaacttgtacaaccattttggaaatcaatatggcagtttctcaggaaactgggaatcaatctacctcaagacccaacaataccacttttgggcatatacccaaaggatgcacactcataccacaaggacatttgctcagttatgttcacagcagcattatctgtaatactcagaacctggaagtaacctaggtgcccctcaactgaagaatagatagaaattatgtggtacatttacacaatggagtactactcagcggaaaaaaaaacaatggaatcttgaaatttgcaggcaaatgaagagaattagaaaaaatcatcatgagataggtaacccagaaccagaagacaaatatggctatcctcattcataaatggatattaggaatcaagagagacatacatggatccacctaggaagaggaaatagacaaaatctcctgagtaaatcgggagcatgagagggagggggaggagggaagggaagagaggaagtaggggactggggtgaattgagggaagggaacagaatggtcgagttgggagaaggatagagagggaaagcaaggaaagaattatcttgatagagggagccgttatgggattattgagaaacctgacactagggaaattcctaggaatacacaaggatgaccccagatacgactctaagcaatagaggagagggtgtctggaactggccttgccctgtaatcagattgatgactatattaattgtcatccagtaactgatggaagcagatgcagagatccacaactaaccactgggccaagctcctgaaatggttatagaggaatgaaaataaaaggggtcaagaccagggtaggaaaacccacagaaacagctgactcgagctagtggatgctcaataaatacagactgacagcttcagagcttgcataggaccaaactagaccccctgaatgcaggtgacagtaggtgacttgggcaatttacagggccagtggcagtgggaccaggatctatctgtagtacacaaactggctttttgaaaaccatttcctatggagaaataccttgctcagcctgggggggatgggactggggggggcttagtcttgcctaaatgtggtgatgggacagactttgttgactccccatgggaggccttacactctctgagaagcaaaaggggaaggggggaaggaaaggtaggggaagtggagaaagggggggcaaatgggactaacatgcaaaaataaataaataaataaatagaattgaagagttttttttttttttttaaagtaaaaagatggctggaaatgaatgtaggtcagtagtagcgtgtctgtctagcacacatgagagcctgaggtccatctatagaactatggagggaaacaagatttttcttgcagagatcatactattagtgagaacgctgtggtatgaaaaatacactctttgaaaaaatagaaacaaaacataaatctgcctttacatagactgttggagatcacactaccaccccacgcccacctcatagtaggcagggctttcctccatccccatacttactctgtcccctaccccctagtcccacttttcacaaagagtcttccttaaccctttccctaagagtataaccatttttcaaattatgtatgtatgtatgtatgtatgtatgtatgtatgtatatgtatatgtatatgtatatgtatcagggtaagatacagagaaaagactaccactttaagcaactgggaaaataatccatgatataaaggaagagtaaaaatgcctcaaaaacatcctgcaaattaggaaacctactgtccaaacaaattgtagccaagaatttactacttaccttctactagaagcattgttcagttttgtaaaggaaacactctgatgcttcactcctagctttaaaagtctgtatgcttctttagaatcagatacctggatccactgaagatcttcaacaaataaagaagatatacgctagtttttaaaaatgtaacatttgtgctacagcataatctttgcaaagtattttcctagtaccatataaaatctttctgttggtcacacatcctagagaaccatctaaaccactcctcactccacaagaaatataaagttgagaatataaagacacttagtatttaagttatgcaaggtaagatggaaggctacaaacattttacagttacaaaaaaaagtaataaatactggaacaccttgatttttatcaccaagaatataattaacattcgagcacaaaaagtatctagacccacttctactcaattataataaacataataaaaaatatttccaaagtacaatcttatttttcttgatgctaaaaatgaataaaattactgatttaaaaaaaaacttcctttttgatgactatagctgtcacaaaacctagaagtgaactttggcgcaataaaaataaacaatgctcactgatttaccttttataaaagaatagccctttacatcttgggaaaggcgtagcatctttctcttttggaacttagatgatacaggaacaaacaaatcgtaaatactttcattgtaaatctcaaagaaagaaacccatacagaatactttatattatcaacatccaggctagattggtcacaattgttcatggattcttcaaattctgggatagtcatagagtttgttaaacttcctataataacaacaaaaagcataaaattaagaccttgactaaaaaaaaatgaaacaaaaaatatagaccatgactcttaggttccttaatctctttaccatctacattaaaaaaatggtttagggagtcaagaacaactatgtggcactcaaagcttagtttctttttatcttctttttcaagaaggaatcaaatacaaattaaaaattctcgatttcaatattagagttagagaaaatgcatgtgtgattctgagcctagatgaaactttacagctactcaggtcatatagtttagtaacactatgtaagaactatataatcaaaaaattaacactgggggggttttgaaattaaaacctttcaaatatatttcatgatgagcaaattaacataaatgagaaaagaatacttaccacaaagaatgtcataactgtcattatgtaaagtaacctaaaaaagaaaaagaataaagtttaaaaacatttttgttaaagttaaataactaagatattaattacctatccaattaaaccacgtaattcagtgattcctgctttagcttatttcctagttaaacaatagcatctcattgtaagaaatttggcaaagtatcaaataagaatatcttgttttagtatctgccaaccaaaaataactgcaaatatatataaatatgtccatttaattattttgcatacatttaattaatatagtaagctgcttttacatataaagtttacttgtaaaaatgtgatgaatacttaacagatataaaatgaatgactcctttattagtattcagatgggtatttacaaaattttacctgtaaaatataacactacaaggaacatctttatgtattgcattctaattatttttataaaatatctaacaaaaaagaatgaactggtagacaacatggtaagtttgaaggcttccagtgtcaatacggtagccccaaactgccttctataaacatttcacaataaaagcataaaaagaacacctcatgtttagattttcataaattagtaatcttttcagaggataactcattaaggaattaatcaatgattttttttatgaattacttacacaattacccacagatctccataatttgctaaaataccattttactttgtgaggccatactttgtaccccaatgaccaaataaaccaaccttccttccttccctctttatctttaatttttttttaattatgtacgaatgtatgcacatgggtttgttcactgaacacattaagagacgagggcttacagaatacagtaacagaaagtttcctggaactagggttactctgcatgaccagtctttcttaactgctgagccaaacctcatctctttcattttttcaagacagagttttgctatggctgacctgaaacatacaaccctccaacctcaaacaaccaaatgtgaatcacttactgttattattattaataaaaccctgttttgtaatatttactattttagatttattttgtttgtatgaatgttttgcctgaactcaatgtatgtgcaccatgtgtatgcctggtgtcccgggaggtcagaagagatgtcagatcccctagaactggagctatagatggttgtgagccaccacttggatgctgggaattgaacccagatcctctgcaagaacagcaagtgctcttaatctctgcgccatctctctagaccctctaatttctttctttttttttggggggggagctcttataaaaccctggctggcttcaacttgccatgtattcaccataggatatccttgaaattcttatctgcctgcctctatctcctagttgccagaactacaggtatatgccaccatgtctagctttatgcagtgctaagacatgaacctactgctatgtgaatgccagacaacactagcaaaggaaccacatctctaacccttaaatgtatttttatttctttcaacgccaatatgtgctattcatattcttttggatgtagggccatcctcttaagcacagctgacaggccaatgagcccacccttaatgaaaacagactctccttcccctaaagacatcaatcttccacagttcctgaattagggatgggggctcatgaacctcctttcccacccatgccagtagtagcttgactagcttaatcttgtacaggtaaccacaagtgatatgaattcataagaacaagggttctgtcatatccagaggacagtttcatcctggtccctacaaactttggctcttacactctttctgttcctcctccaaatcaggtcctgagccttggagaaggaggtataacacaaatgtttcatctgtaactgagcactccactgacacttattctcggtcctttcaccagttgtagatggctcagttgttaaaagaactggcagctattacagaggagccaggtttggttcccagcaccacagtggctcaaaactacctctaactccagttctaagggatccgaaactatcttctgccctctgtaggcaccaggtatgaacatgtcataatacacaacatgcatatatacatacatactagatgcactcatgtaaacactcatacaaataagtctttaaaagacagaggtgaaggaggatctccttatgttttccaggctggcaccaaatacctggacttagagactcctcctgcctcaggatctggaataatttaaaactacagcacatgctaccagacccagcacatgactagtctcctgaaagtctaaagggaaaatcattaatatttttaaagtaataattaaaacaaattaatagcttttctatctttaacaataaaaatatctgaaaaaataaaacccagaaagacagaagataaattaattttaaaattcattataactaataaggtactatcctacataagacagcattgttccatagaatactacatattattctatattacagtttcaatattcccactaaagtttatgttgaaaaataattcccattgcgaattaataaggggtgataggccagataggctcactcctttaatttcaatactgacatttagaggcagatctttgtgagtttgaagcaagcctgcctgttctacatagcaagttccaggccagagctgcagtcaaaatgctttctcaatttagagaaagaagaaggtgattagatcacaagagctctgatctcatggattaatccattcattaatcagtggattaacgggtcatcccaggaattggtgtgctataaaagcctgtttggctctgtatcttggacacacctctcctgccatgtgataccctggatcaccttgagactctgtactaagtttccaccaagaaggtccttactagttcaaaattttgctattacaagttgctatctccagggtcagtgaaatagttcagaggatacaattgctactaagactgaggacctaacctagatcctcatacacaatgagaaaacagacaaccttgacagataacagacaagtaatctctctctctctctctctctctctctctctctctctctctctctctctctccctccctccctccctcacccccctctccctctctctctctccttttaaaaaattcctggctgtagaactacggactaattataactttataaactacccaaaagtatttagttataacaactataatagtctccacaacaccaccaccatacgaccttaccatatgaaacattgtcagatcacagtgcattaataaaaatttcacaaactaaatgaatactgaaaaacaaataagaagccatggagatggctcagcaggttcagcacttgccacaaaaacctgatgagcctatttagatcccccaaatcaacagcaggacacaaccaactctcccaagttgtcctgtgatctccaccctttaccttaccacctgtgcacctgcattttcacatatgcatcaaacacataaaaacatgtatgcatgtttgtgtgtgtctatgtacagatatttaaagaaaagcaaaattctcaagaaagtcacaacagcttagaaaatgcattaataactaataatgcatttggcttttttttgttttgcctgattaaactgagtgttttatctatactatgctatgctaatgttccatcaccatgctaaatttcaagcccttaggacttattttaacaaatgagtttctaaaaataaaaagaataaatcaaatgacaaagaacacctgaaatttcacaagaaaaattctaagatgccctaatgacctcatttataaaaaaacataaactgagggatagctgagatcattgatcaggtgactatatgtagactagtaaatagctctcagggccaagtgtcagagcacatgcttgtaaccccagcaccagggagcaaaggcaggaagactaagagtcaaggacaagccaagactacatagtgaaactgtgtccacagagggaaaaggaagtgctcagggttaaactcagtttggagaaagtaacaggaaatatatttgaaatacaacatccccttgctgaagcactacttatagcaagttcaccaatatgaaattagttttataagctgatttttttttaaaggaattaagttaaacacacaaactgctaatagacaccaatgatttagaataatgaaagtgtggaatattcctttacactgtgaatatatgttattgtgattggcttaattaaaaaagctgactggccaatagctgaacagaaaccccctgactcctacaatccctcctctctttcttcaggaggactcccagagcttggatcaatgcttagatgagtatctctgcatctgcttccatcagttactggatgaagactctctgatgaacacgcacaatagtcctcagtctgattacaatagatgactagttcaggcaccctctccactaatgctaggagtcttagctgcggtcatccttgtggattccagggagtttccctgggaccaggtttctctctaactcctatcaaaacttctctatcattctcctcatctgtctagtctccaacccacaccctcaagttcccatctcccccaattcctgcccccagtttacccagatctctagttccccttcccagggaaatgcatccatgcaaccctctttgttatctaccctctctggagctgtggatttcaaggtgattagcccatactttacccctaatatccatttatgagtgagtacataccatgtttgcctttctgggtctgtgttacctcactcagaattttttctagttctatccatttgcctacaaatttcatgaggtcattgtttctaaagatgagtaatattcctttgtataaatgtcgcacattttccttattcattctttggttgaggggcatctatgtttgcaggttttggctattataaataatgctactatgaacatagttgaacaagtgtccttgggtggtttgattgaacatcctttgggtatatggccaagattgatatagctgggtggtttttttgttttgttgtgttttgtttttagagacagggtttctctttgtagctttggagactgtctatatctgatctataccccatttttttaattggattatttgttattttgatatctagtgagaacctaggttattttataaagagtaggatttcactcctgtttaaaggaaaaaaaaaaaactgtattctacatataacaaagaagggcaagaatgtagctcaatgttagagtgtttacctagcacaatgaggccctggatctaaccagtatcagaaaaatcaaatgtgaaagcacctgcatatgagggtgcatatccattcagacagcaagctttctgcatgaggtgcaccaaggaagtctggcactcaggaggcaaaggcaggaagactgaaaagttgagatcagctgagctaaataagaagcctctcaaaagaaactgtccaaatattcattttttgtttcctatattttttctttaaatttttgtattattttcaaatattttcaaatatttcataaatattttaaaaatataatattaatactataacaaaaaagattactatcatttacatttctatttagtattgccatttgccactttacatatttttttcaaaaataaaaaagcaccatgaccaaaaacagatgacacaagctaaaattatcctgaatgtttacaaaagctttccttgattttgatattttatgtactaaaatactaacatacctctttaatttgccgcagtaatgcacttttgttagcactttcctctctttcttgttcagatgataaccgtaagtattctctacatctatgtggtttgacgttcatctttgtatatagtctttcctgaagactaccaaacaatacattcagtgttctaggcaaaatgccaatattttcttctgtgcctataaaaagataggaaaaaggtaatgtttttggattaacatttatccatttatttatactaccaatatcaataagctataataaaaaaggaaaatgcaagaaatcaaagaattatttggttttctatcatttcagtatttactgcattgtcaacatattctgattcaatagcttgaaattttacattcagatctagcccaaatattatgatttcctatcacccatcattacaaaatgaaatgctttttatttattccatgcctaattatctaaagcatatcttaattattaacaatatattcctctctatcatatattaaatatcagcaatatatgatgtttaaaaaaattgaggggatacccaggtaagaggtctagttaggagttgtctctgtgtgaccaaattaaggaggaaagttaggacaagaaaataatttaatacagcatggagacagtagtacattttgtaaggtgcttgcccagcaacaacatgaaaagatatggatatcagtgtgttgggggaaataagccaaatacagaaagcaagtgtgtatttttcctatcatatacagaatctagatttaaattgagagggagaatattactgaagtaggaagggaactgtgagaggggaagaagagatattaagggaagacaaggcaaaaagaggaagctatggaacagatatacatgtgtgtgttttatatacatgtaatatatatgtgtatccatgtgttctatatacatgttatatatgtgtgagtatattttctacaatacgtgtatgctctttcagaggaggaaggggaccagaagaggaaggcatgggagagtgggggaatgaaacagggggaaatgaaaagaaccaattataatgacatatatgtacaaacatggcataatgaaaccaatacttcaaccttgtttttgttttctgagataaggtttcattaagtagctctggctagaatggaactcactacgtagaccaggctgtcctaggactcaaaaagcagcctgcctcagaggcctcctaaatgctgggactaaaggtctacaccaatacctccagctccaatactttttaatgttaatttttttaaaagccttaaaaacatacatataagcaatagttaacagactcagcaggttgtttatatatgtattcacatatatatagtaaaaaagaaaatgaggttatcagtttgaaaaggcgcatagaagtgatataaaaccagctggaggagaaagaaatgtgattatatttttttatggaaaaagtagtaaaaataaaaaatatggactagatgacggaaatacaactacatgcaattactaaaataccaaatgcatactaatggttctattttcttttctagtcaaaataaacaatatttaccttgaaatgtatatgtttttccagaattggtcagcccatatgtaaagatcagccgactgtgtcctttcaagaggtcttttactggctgcataatgcaacccagaaagaactctttctgtgaagtttctggtccaaaaacctaagagagcatttttaagatatgacttttaagaaaactcatgttccaaaattattaagcatttattttgaaatagttattaaaaacaggaaccatgtctctaccaccaaaagtacactgacaggatttataaatttttagaatagaaacttcaaggctggcaggatggctcggtgggtaaaggtgactgccagcagccctaacaacctgagttaaatccctgagaaccacatggtggaagaaggagagtaaagagtcctgcagggtcccccacatgcacatcatggcaggcacacacaagtaaataaagtttaactaagaaaataatgctaagaaatctcatacacccagccaatcagtatctcatgagttttagaaaatatttttaattaaaataaaaaagctaatacagtgtcttacttcaaattataaatttacagacctcagtcttagtttcagggaaaaaaacatatgcatgcgtgcgtgcgtgcgtgcgtgcgtgtgttgacatattatctgcaatttaataatgcttgcctgagggttcaggatgcacagtcagtcacaagctatagaggtcaggtagtggcaatacacacctttaattccaggactcatgagacaggaagatggatctctctgagttcagggccatcctggcctacacaagagtgaagagtaacagagcgcatgcctttgattctagcaactttgatcacatacctttaatcccagcactgagcaggtacagacaggagtgatatggctgggcaaagaaaggaatataagaaggaggagacaggaactcagagcttttgtctctgaggatttgtggagacaggattgtcatttcagattggtagaggtaagatctactggcttggctactttgcttctcaagtcttcagcttgaagcttgaaccccaatatctgtctctacatcttttattttctgtgttacatatatacacacatatttatatgtgtgtacatgtgtatatatatatatatacatatatatatatatatatatatatatatatataataacaccagtaccaaagactgaagttctatgagcacaaagcaagcgcttcagtgtacacaattacacaacaatttagcccaagtcaagtgttggcctgtttaaaaaaaagaaacagaaacagaggaaggagagggaactggaatattcttcaggggggaagtatatgctttacgtgtgcaaggccctcactcaatcaactacatagcttgagcgagcgcgcgcacgcgcgcgcgcgcgcacacacacacacacacacacacacacacacacacacacacacacacacacacacacacacacacacacacacggtacttagttaccttagaaaaactgaatttctgtgccatctgtccagagttcttctcacttagctggccaaggatgctttggggatctttcagcagaacattctgcgaatctagaacttgtacacaaccctagaaaacaggcccacaatagtaagagtagcatttattgaatgaaagcaaaacattaaaatctaattaaattcaacacaaacctcagcctcatgttctttttctgactgggtaaatggtcttattcgaagacaaacttggaggtaatttttagatcccaaactgtctgcctaaaaagaaataaataaaattttaaaaaatacagaatattgctttttcagagattaactattatttatataatagtctacagaatttttattcagacactaacctgtattggttttgtttcttagtatttctacaaccaaggctgttgcacgaataataaagactcagagtgtgagtgatattggggttcagcttcaagctgaagatcagaaaagcaaagcagccaagccaatagatcttacctctactcagctgaaatggcaaccctgtctccacaaatcctcagaagcaaaagctctgaattcctgtcccctccttatattcctttctccgcacagccttatcctcctgtttacacccccacaccctcccagccccccacccccgtgctgggattaaagtcatgtgatcccaagtgtagagatcacctttgtgtgagctatttcttttaggactggatcaatttcatgcagttactgagcttgaactaacagagatctgtctacctcttaatccagagtcctgggatgaaaggtgtgtgccaccactgcctagcattatggctactgggatgaaaggtgtgtacaccactgcctgagctctgtagcttgagaatagctttggtttctgaatcctcgggcaagctttaataaatcatgaataataaaccaccacacaagtgtaggtcctttatctccttgatcctcgggggttaagagtgtgcaatgctcttgcagagggtctgagatcaattcccagcagtcacatcaggcagctcactaccatctgtaactctagttccacagtatgacaccatgtgacctcctagggcatcagacaaacatggtgcacatacatacatacattcagaaaaacacccatatacatgaaataaataattttaacaacaacaaaaaaaaaacctggtggtccaggtatggtgttacacacctataatcctgctactctaaaggctaaagcaggaagaacaaaactggaagcctctctgggcaacttaaaaggtctaagggatataatatagttcagttgtagagtgattgcctagcatatataagccatggcttttatcaagacaattcagatctttttaaaaatatataaataagggaagtttttatctatataggcaggggaagggaaagggaatctagatgtaataaagtttttaattttagtagaaaaaaaatttcaggaagtcaaggtcattctcagccacatacaagttccagaccagcctaggctaactgatataccatctcaaaacaaccatacaaggccagtggtgcatgcctgtaatcccaggactccagagatgcagaaactagaaggtggggtgaggaaaagctacaaagagagaccctgcctcaaaacaaagaaagtaaactttgtcctaacttgataaacttcacagagatgtaaagtttgggatgtttgagtggcttctttaaaccagctgtgtgatgttctatttgtaaattaattaatacaaggtgattttatttaaatcaaaagagacagaaaagtaaaaacaataattcatatgacttgtgagaatggttttgctgaaggcaaactgcagccatcccatgactttggtcacaagagcttcaggcacacctggtgttatcgtgtattgcaaacataataaaggactagagtcacctaggcatgtgacgctctactttataaggcatgcaaattagattagggaccttagtatgaggaaatacttcatgtgtaacaatcaatacatatgcctttgtaaggctgctcagggttcagtccattagagaggctggaccaacctgcagctgaataggccttatcttggagtgccttctttcttcaaccaaccctaactacatagtgcaccccgacaatagagatattgcaggttcagttcctgaacgcacaataaagtaaaaatcacaataaagaaggctacatgaatatttcgccagttagcttaactaccaaagatgaatgaaagaatgaaacctgaaaatttaaaataatgttttcagatggctaccaggttaggacatacatacatgctaagttgtttaggcccactgtttgaaaatgaactattatgtatttcttttgacacagggctccattgaaaagccaggatacaagtctgctttaaatcaaggaagtttatgaaaactgtaacatgaacacatttgccctggagcacaataaccaacatagtgtttttcttacattgtacttaccccagggttttcagcaactaaggaaaactttcgagagagatcaagcttaatgccatcaaaatttatttctgaaggccttgcaattgggtcagcactaaaaacataagatggtctaggcaatccatcttgattcaaatgagattccattctgcaagaagagcagtaacctctttaagacaactgaaataaatcagcataaaagccacccacaattggaagtctataatccaaggaacttaggtgtggtttacttagtacacttgttagcatgcacaaaaccccgggttctatcccaagcataaacagggtgtggtggcatgggcctagaatcacagcactagaggtggagcaggaaaaccagaagttccaggtcatcttagctacacaggggatccaatgccagtctaggctaggccaagatctcttctcaaagaacaaaaaataaataaacataggttagacatgataaacccagccctccacccaatccaaggaaaaagcaagtggatctgagtttgaagtcagcctgatccataaagcaagatcttgtctcaaattaactgattaattaatctaaaaagtaaagttgacagttcaacctaacctactactttccccccaccaaaaaaaaaaaaaaatgaattcaaagagagaaaacattagactgcttcatttacaggacaacaacctattatatttacagattctaaatatactaatattgaacactacccacaactattcatgtgatccagttctaggaagactcatccaaaggcatgccaagaacaaatgcaatcagtaaaagaagagtatgaaatgttcactcagcctgaaaccctcaccacaaaagtcaaagagaccaccaggtgaatcaagatcttgtgttactttcaatacttagtgaaataatgcatataacattaaattgaacaacaaatcactacagggtaaagctgaccaaaaaaaaaaaaaaagaaggaaggaaagaaagaaagaaagaaagaaagaaagaaagaaagaaagaaagaaagaaagaaagaaaagaaactgaaatatttttaagactcaaccagatgtgccaggcagtggtgcctggtgctttcatcccaacaatcaagaggccgaggccaggctggtctacagagttccagggcagccgaggctacacagtgaaaccctgtctcaaaaaaacaacaagcaaacaaaaaaacctaccagagaggccaaggtcgcctcttagctttttttttttttttcaaagaaacaaattaacaatccaacatctgcaaggagattcccaatttaaggaaatagtcatccatctacatttgtttactctacggcaggctcgaaacacatttcaacagaagtgtccaactaaaactgttgcactcttattttctttatatacgtgtaaaaccaagataagcttattttctagccacaaagtggtatgagaataaacactggcctctgcccagaaagagagagcccttgtcacgtgccgaaaccgctcacctcaggaattcaggcagccagatgtggtaaatgtctcttatctgttctataaaaatattaatgtcgccgggcgtgggtggcacacgcctttaatcccagcactcgggaggcagaggcaggcggatctctgtgagttcgaggccaggtctccagagcgagtgccaggataggctccaaagctacacagagaaaccctgcctcgaaaaacatatatatatatatatatatatatatatatatatatatataatatatatatatatatatattcacacatactgatgtctttacatctagcctgcatctcctttaacagaccaagaaaccagggcccaaagagattgaaggcttgcgtgtctcaattacctaagttgcggctcagcccccacctccagcagccccgctcctagactccggcagtcacgagcccgtcaacgctgacacggccgcggtgtcgcagcctcaggagctccgggcaagcagccaccctcacgagcgtcggctcctcacctgcagcatggcacgaccctggcagccgggagcagctcggaaaccactcggttttcaaattcaaacaatggcggccggaaccgcaatggaccctgggagtgggcgtggctttcccctccttcccccacccccggagccaggctcgcgcgcggccgacttttgcccgcggctccggaagagcctttcgaatctgggggcgggccttggtgctgtgggcgaccaatgggcagtggcaggctcgtgggtcgcctggctcggcgttctccgggtttctcccggccgcggtaggtgtgagcgtgccttctggttgcgggttgctgtccctaagactagtcacctcagagtcctgccattccggggccagaaaggacttgtgacttggggccacggtcagttccctcgctgacgtcgacagcggccctcgtggatgaaacagatttttcttcaaaatacattttagaagcatttccttcatctttttcttttccttttccttttccttttggcttctctgaaagttgtaaacgagctaccgcttcaaggcgttgggctgtgacagttttatcctaggcaaggtctttgcaatgtccaaaatgtaagtgcccgagcatccttttctgctcaagtaatcctgtgattgaggtcctaattgctagtgcattcgtatgacgggggtttactagtgggactagacttcatttcggataaaaaaaaaacaaaacaaaacaatgctaacgtaaactgagcatgtgccttatgcctccactggcacttagtttacagaatggattgtctggtccagagaacaacccgttaatgtaagtattgctatcgtctcatataatacattctaaaataagtaacgggcacaaaggcaagtggaactgaaatttcaacttagctgaagagtttcctgaccctgctttcctataatcatcttttcagctctttacttgcttggaagcattttggaacacttgcttaacaaagtgttttccaccctacatacagtaattacatctcctactaacttctcagtctcattccatttgcccacccctgcacaaaataaaatttgagggggactagtttggaattgagaagtgtggatacaagggacgtcaaatgaaaactgcacaaagaaatgtaaatgtaaaagggggaaagattaaaatagatacttctcctttccaggctacaatttaagtctttttgtttttttgagacggggttccctgtgtagccccagctgtcctggtactctccctgtagaccaggctggcctctacctccagtatgctgggattaaagatgtgtgccaccaccaccctggctccgttggttttttgttgttgttgttattgttgttgttgttgttgttgttgttttcccaaaaggtccttctatgtagctctggctggcctcaaactccatacctttctacctcagcttctttccaatgctgaaatcatagaagcataccagtaggtttgcccaacagaatgtcagtctttaatgggctttgccaattttcattgcttcttccgataagtctattccctagatccaagttgtctaccatgcctcacagtgccttgctgtgcaacttattgataatttccaaccatccatgtggcacctttatgtattgatttggcaaacatttgctgaaaaattgcaatatgctggggctgaaggtgatagaggcagtaggtgagaaaggtgagcacaaagacaaagactcctaaggacattttaatagggcaacagtcaagtcacaaaataagaaatttaaaccactatactgagaggtttaaagggaattgtcttagagatataatattgtgatggggaatacagatgaaaaatgtttcatctgtattactgaggatcattaggaattaactagttaagatatataaacattccaagcagggataaaacaaaatccaatggatctccgttttgattcttatttccagcagcgtttcccagccgactacaaatgtatgatgcttgaaacattcttccctgggctactgggtcagcactttccctttatacttctttatatgttacacttttcatctcaatcgccatagattatcctttctcttttgctcaaactctaaaataaaagaatgttgagtcctgatgaaagacccctgccccttagctcttaagtttgcctcctcctccggtcggcggctgatggggcgcgcggcggatgcctcgctcctgcgcctccccgatccccacccccacccccaccccaccccacccccacccccccacccggcctccacttcccccgccgccacacgtccggccgccggttccctccaaagctggtccaccccggcggggcccgcgtccccggcccatccacctggcactgcgtcccggggctagggccgagcgaggagcccgcgaggcagcccgagggcaagcaccaggtgggccggcccggggccccgcccccacgcccccgcccgatgggggacactccatcccaaggccctcgaccccaaggtcagccatctggacgcggaggggggaattgagtctgttgtaccagacaccagaccttgagaatatgctggtctggaatgactttgtgcctcacttgaaccgtccaatagaaatgactctgtacttcgcctcatttgaataaccctgtgtagcgcctcagttacattgaccaatgggaatagctctgtactgcgcctcatttgaattatccaatagaatccctgcttctcgcttgcactttttgctatataaggacccctctcccttggctcggggcacttggcctcacagaagctaagtcgccccgggtacccgtgtctccaataaagcctcttgcagtttgcatccaagttcgtggtctcgctgattcctgggtacgggtctccttctacgaaagtacctccacgggggtctttcactgagacctcctactttctctcctgtctagttttctacttgacaggttcatcaacttttatatacaacacacttatacagctgataaattttctatactcagattttatgtcagcgatctaactacatggaaatattctactacccacttagtgaagtgtgacagatacctccataacatgatcagagtgaaactctgaatttttcgatattgaagcctaatcctcttcatacttggtttcttctgtcttgtaaatgacttctagaaactagagaatcatcattgtatcctttccctcaacactcaccaagtacataaacaattccacttcaaggcacattgtttggtcttttgagaaaatattcactctgtaatggaaactagcctggatcccaacattcctgcctcatcctttccactgatgggattgcagatatgaaccacctaggggtggtttttaattttaagatttttgttgttgctgctgtttatgtgtatgagtgttgacctgcatgtgcactgaatgaatggctggtgccagtggaagccaaaagagggtcccagactctttggaactggagttacagacagttgtgagacctgatgggcactgaaaaccaagcctctgcaagagcaacaagtgcccgtaattgctgagccatctctagccctcaaacttttaagtgaagtaaatattcctttccctttgtttattttattttattgtgtatatatttcctggatgttttatgttaacaattttctgtatttaactttttctttgactgatgaatctgttgtctctatttatcttcaatgcctatgattctctcttccatctcttgtgttctgtttgacatgctttcctctgtagttcctgatgcttatcagattttccatttccagaattccctcgttttgtgttttgtttattgcctctatttcaattttcaattcttgaactgtttccttcacctgtttgatttttttcttggctttctttaagggatttattgatttcttccaatttttgtttgtgttttctttaatttttcatctctgcgtgtgggggcgggtggggaggtggatgcttagatagacatggttcaagacagaggagtcttgtgggaacagagtccagtgggtggcagtggtggtggtgcagcctgttcaaaggtttcttacctgttggttggcttctggggtctgcaccagagcagtggggtccaccagatctgggggcagggcccagctctctagcttgggctgagatggtagggcctagagactggggcagtttatctgggagaccagtcatttacctgttctcctgcctggtgtaggtggtgcttgtgcctatagggactgctgatgttacaggggatggttggccaaggggaggatgatgggatcagtgggtttggtggcagaatggttcttgtggaaacagaatcaagtgggtgttagtggtattggtgaggtctgccaggaggtcccttacctgctggacagctgctggggtctcttgattcaattttaagcagtctatacaattaattgtgtataataataacagttattatttttgtcattattattttgaaacaaggtctctgactggactccaactcacaaagatctgcctgcaagtgctgagattaaaagctttgccaccatgcccagacaattgctgatttttaatgtggtcactgagctgtttaccaacaaaatatcataatatatctaccatttaccttcaaaattttgacagaaactacacaaaaccaaaatagaaagaaatgtgagaaaaaataattattgaatctaggtgagagatacagtggtgtgcattgtgtcattctttcaactcttaaaaataactttgaaattttccaaactaagaggaggtgctaaaaggaacctttgcttgcaccagccaaactcttcctgtaataaattcgtcttttctggttacctcaagtaccaggttctttgctgaatgtatgattcagcaaagtgttcttggtttctgaattctcatatccccattcagtagctcatttctcaggttccttttgatcacaaacaagcaacttcaggctgaagagttggcttaatggctaagagaatgtattgttcttacagaagacctgaatttgatccccagcacccacatcacacaactcacaactgactgtaaccctagatcaaaaggatctgacatggctctgacctttgtccttgagtgcccacatgtagacatatataataaatagtaattttttaaaaatttaatgactttcttcgagaacactttgctgctttgtctcaagcctgtttttatttgcaggcttaataatctatttcatatttactacaactatcaatcgtgatacttggttcttgttaccaccctctcactcttcttaggtgggtttctgccaactaccgacttatcctcaaggactctagagatacataacaactaaataaatatttgtccatcagtaattgagggctcattggacaacaacagagactacaagtagtggggagtatatctgggatatgagataaggccagacctgtagccttaattagccatattactaatgtggattttatgaaatgttgctggactattttaaagatgaggaccttaaaatccaatttgcatctctctgtggtggtatataatttatgatttttttcaagcttgcctgaggattcagaaagcaaagccagcctcagctatagagatcaggcagtgatggtacagacctttaatcccaggactcaggattaagaggtagatggatctctgttagttcaaggccacactgactacacgaaattgatgctgtactaaaagaaacagctcacacaacggtgatctctgcacttgggatcacatcccaggcactggggaggtggagacaggaggatatggctgggcagagaaaagaatatatggaggaggagacaggaattcagagcttttgcctctgaggatttgtggagacagaattgccatttcagattggtagatgtaagatctactggcttggctgctttgcttttctgatctttagcttgaagcttgaaacccagtatcagtctctgggtcttttatggtctctctcttttaaaaggttagacttctgaagaagaaccagctagaaggctattacagctgcctcaataagacatgatagtgggaatttgggagatgggagagaagacacagtaaggaagaaagatttgagaggtacttttatgttttttcttttatttctttatctttctttccttccttccttccttctttctttctccactatagtattgtagtctctctacataggcagtcttccatctcagagatccacctgcctctgcctcccaagtgtgtgccaccatacctgatttcatttttcatttctgtaccagtcactagatttagagacacaaagccaatatgaaaggagagagagagtatgatttttgtccccatttcaaagaattttatctggacattagcataaaacaaaaaagaaaaaagatgagttaagggcagatgatttcctgccatggtcacagcctctgctagtacaggcttacctccaagacattgcagacaccacagtaaagggactatataacaaagcgaatctagattgtctcagattttcaacatatataaaagctatacacaagccaggcagtggtggcatatgccttaatgccagcacacaggggacagaggcaggtggatctctgtgagttcaagaccagcctggtctacagagtgagttccaggacaggctccaaagctacacaaagaaactctgcctcgggaaaacaaaacaaaacaaaacacacacacacacacacacacacacacacacacacacacacacacacaaaccattaaacacagtgagacctgatcagcagtttaagaacattttgttgttcgtgcaagactcacgttcagttcctagcccccacacggtggttccaggggatccaattcccccttctgaactcttcggcaccaggcctgcacattgggtagatacataagttcatgcaaaacactcacataaaaatagattgaatttttttcaaaagttatatttacagtatagtatagtcacttcagtgtagtgtcacgtgcttgtaattcagagaagtcagcaggaatattaggagtataaggccagtctgagctcacaagactctgtctcaaaaacattggctttataactcagtggtagagtgtttaatctagcatgttcaagttcctgggttcaatgccagtatgtatgtaccttaattaaaaatatttattgctaaaataaaatgatagtccttgcctccagagagtagtgacctctctactggtggatgatcttactttgctgattgtgtgtgctgattagtcaggctggtggctgttgactagagcagctagaggaatatttttcttttttctttttttttcttttttttttaagacagggtgtctctgtgaagtcctagctgtctgggaattcactctttacaggctggccacaaactcagagatctgcctgcctctgccccccaagtgctgggattaaaatgatgtgctacaaccaggcttttttctctaagacagggtctcattgcattatgtaccccaggctagccttgagcttactatacagaccaggctactcttctactcatagaactgctccagattatcctcctgggtgctgggattaaaagcatactctgccactcccattaatagtaatttttaaaactattcatattttattttatatgtatgagtattttgcctgcatatatttctgtgtaaaacgtgtgtgcctggtgcccaagaaggcaagaagaaggtgctggatcccctggcgctgtatttgcagactgttgtaagctgctgtgtggttgctggcaatggaacccacatcttctggaggagcagccagtgctcaactcccgagtcatctctctgcccttagaattgcctcttaaaatacgacaacaatgaagtttttcatactgatttgctcatactttcatgaagtatgtctctattgaatgtgcttttaatagcacattaccaatggtagagtgtctataaaaattagagtcaattttattttttaattatactttgcccataggtaggggcattttgtctgtgtgtttgttgttctctgtctctgtctctctgtctctgtctctgtctctgtctctgtctctctctctctctctctctctctctctgtgtgtgtgtgtgtgtgtgtgtgtgtgtgtgtgtgtgtgtgttcaggcatgtgtgttactgcacatgctgtacatgtgtgagtgtgcatggtagatgtctgtggtatatgcacactatgtgtacaggtatgtacacctgtgcactaacaggaggcccgaggaggatatcaagtgtagctctctgccttattttcttgagacagagtacctaactgagactggagcaaggctaacagccagcgaacccagtgatcctcctgtctttgcctcccccgcaagtagtgttacgtgtgtgaccacactcaactttttaaatgagtttaggggatttgaactcacactatcatgcttgcatagaaaatgcccttacctgctgagccatcttccctggtcctaaagtcaactttttaaaataacctatcctaaagttttctcatatgatttgtggcaatttggtcacagcctcaggtcacaactaattgttacaactaattctagttctcttggtatttccacattgcagttacttcttcctctggagtcgtgaattctcacggtcatccatgaggattgtgaactgtttccaaactccttttaagtttgaatcacagatttcttaatgacatgtagaatgttgagccctttacagaacatttgaagtttactttgcccagatccatcatagaagtggaactatgatacatttcttaaataatataacttaagtcatgaaattacaccttgatccatgaactgtaaaaatgggcattatattaccagacttgaaaacattaacttatctctactagaggtcttgggcaaccaggtacattatcaatggaaagtcatggctaaataatgaatcccttattcctctcttataaagaaatatttttgccaggtatgatggtaaaagcatttactttcagcatttacatggatctctatgcattcaaggccatcctggtctacataagttctaagccaggcagatacacagtgaaaccctatctcaaaaaaaaaaaaaaacagtattttttggtttggttttattgtttgtgtttttatttgtttgtttgttttttttctgaggcataagacccacagtgagcattaaatatccagtagaccatgttataaacagatgtactgtcatccaggatctgttatgcagccctcacagtctgcttcttaagggaacgagtgttttcagaatgtccaatgagctttcacttccacttgaagtcaccagcttcattagcactccacaagagaaccaacctgtcctttgaggcttggaagtcaagaaatgatttcttcgttgcatctttgaacatcttaaatgtcatcttcttcccagatggggatattttgattacactgagaatctcttgttgactgccgtcaccttcatcgtgaccctgcccagctgtggataactagatagttaatgcttctgcagctgtgcttgctgtttcacctagcactgtgttgcagcagagatgggttctcttaatcttcatgaaccacatgctagcttcaagccgatctcttacaacttcattgcctctcctagtcttcatagaattataattagagcctacatagggattaggctttgactttagggaatgttagagctgacctactctctccagaccactaaaatttctcttgaacaatgtcattctctgtcttgtcatctgtgtgctcactgtgtagcccaggggcactcacactcagctttcttctgcttcagactcccaagagctgagattatgcaaatatcccaccacacacaacgagagtatcattttaatttttttcaagaacttctactgaacaaacctagacactaggtttaggtgacatagtgacctgacagtggtgatggcagtactggtggctccctctccccaaagtgtcatataaattgtaaaagatgacttaaggcttcactacttgccaggaactatgtctgcacaaggttctctgtcctaccctaccagttttctgaagtcattggtttgaatattaactatttctttgcctttgcatcaatgatttaaaaaaaaaatctcagttcacaagtcactgaagatgaatctgattatgaaactggagacaagaaaggaaacacagtgctaacatttcaagaccttccctcactgcccataatctggcaaatacatgaaaccatattatccaatggaaagttctgtttgtaattaccaaaatgcaaccgcttaaaatccaaatgacagtatttacagagatcatgaactgcactggattggaaagagcacaaggtggtgctaatcagcttcacacagggtccttgaccaaccatcacagacctactggtgaactctagcttcctctagagacagtaaggtctctgcctgtgtgaccctttcagttacccaaggaaaaggtgtcacagatatcctattaaggaataagtggcttattgaggaaagccactaaattattataattaattgctgagtaaggagactaaaagctgaacatagttagtcccagtacttgagaggcaaagacaggcagatctatgagggttcgaggctagccaggtctacataatgagttccagaatagtcagagttacacagtgagaccctgactcaaaacaaaacaaactaacaaaagcagactgatttcagtaatatctcaaaagatgcagttttggtgtgtacaaataaggcctttataatattaagaataaggaagaataaaagggagggaagaaggaaaatgagaaaaggggaaaaagaaatgagggttgttttttttgtttgacagtatcaagccatgtagctcaggttagcctgaagctcactatgtggcccaggccagcctcaaacttaatccttcaatctctgcctactaattctgggatttataggcatgagacaacacacctggccaagaaatgcatgtattttgcttctagtcatctaatgatttaggatccttgcatcacagaaatagaatatcaaggtgtgtgtaggccatgctaaatatggtgacacatgtctgtaacacaaacactcagagacagacagaaatgttgcaagttcaaggtcaattttatctaggtagttagtttccagccagctaaggctgcatactaagaccatgtcttatcaaaacagagtaagaatgttggggatatagctcagtcatagcgcacttgccacatggtgcatgtgcaaggccctgggttcaatctggaagaaactacaagtgatctagttcaccctttcattttttagagtcaaaataaaatattctgaaaagcaattgacatacaccattgcttagtaccagaggaagaatatgaaaacaaagaccataaccatctcccctgagctaggagttagaatcagaacaccacacatggtaaataatcacctgccacaatatctgagaaaaacttacagaaattttactcatagctattcactagtgcttcttgaaaagtttgacattcctacaaagcagttacatgcatgagcattgctgccactgctgtgggggctatttggtgatgctcttctttccagcaagtgggaaggcctaggaggaggtttgggacttgtttgttttgctttaatgtctgggaaaatgtgtttttaaaactgtttgttgtttttaaaactgtgtgtgagggagaagagacagagacagagacagagacagagatggagagagacatcgcacatatatgtgtcattgtacacatttggaggccagagaacaccttttttttattttttttttattttttatatatttgaattacaaacaagattgaattacatgacgatcccattcccttctccctcccttcctcctctaccacccccccactaaaaccctacctatcacatgtcctttcttctaatctacacctgactcaacctttctgcttcctcatgacctctgcatccttccttttcttcccttctcactcttgtagcttccttccccctcttcccatgttctcaattttctcaggggatggtgaccctttccccttctccaggggacaaagtttgtctcttttagggtcctccttgtttactagtttctctggcagtgtggattgtaggctggtaatcccttacgctatgactaaaatccacatatgagtgagtacatctcatgtttgtctttttgtgattgggttacctcgctgagaatggtttcttcgagtttcatacattttcctgcaaatttcaggattccattgttttttcctgctgagtagtactccattgtgtaaatgtaccacattttctccatccattcttccgttgaggggcatctaggctgcttccagtttctggctattacagatagtgctgctatgaacatcgttgaacagatgtctttgttatatgaatgtgcttcttttgggtatatgcctaggagtggaattgctggatcttgtggtagactgattcccattttcttgaggagtcgccatacttatttccaaggtgtttgtacaagtttgcactcccaccagcagtggaggagtgttcctctttcttcacatcctctccagcataaactgtcattggtgttttttattttagccattttgacaggagtaagatggtatctcagagttgttttggggttgtggggttggtgaatatcttttcccagtctgtgggctgccgttttgtcttgctgactgtgtcctttgccttacagaagcttctcagtttcaggaggtcccatttattaattgttgatctcagtgtctgtgctactggtgttatgttcaggaagcagtctcctgtactgattaattcaatggtatttcccactttatcttctaataggttcagtgtggctgaactatcttctaataggttcagtgtgggtttatgttgacgtctttgatccattttgacttaagttttgtgcagggcgaaaggcttggatttatctgtagttttctacatgtttgcatccagttatgccagcaccatttgttgaagatgttctctttgttacagcgtatatatttggattgtttttcaaaaatcaggtgttcgtaggtgtgtgggttaatatcagagttttccagaaaacaccttttaggagtttgttctgttttggtttttgaggcagtgtctctctgtttctgctgctgcactatactcagcttctgactgattctcctgtctctgcttcctgtcttactcgagaagtgttgtgattacagatacataccaccacatctctgtggctttcaagaatcaaactgcagtcctcaggcttgcaagctagtgttcttactaaccaagccatttcctggcacctgctttttacttttgactatctttgcattgctatcatggaacctttctttgtttctgtttgttttatttaatttttgaatagagttgggttttataaaagaatatttttagtatgtattttaagcacacgcattaaaagaagggaaaaggtgcctggaagaagtagcacataccagagagagcatggtgtgggctcctttaagagatcatctactatcagagagcatggtgtgggctcctttaagagatcatctaactatcatagaattcccatcgaaagctttttataatttttaaatggattggtttcattattgtgtaattctctttctgaatctcaaatattgatctcatttgcagtaattgaaaataaaatgaaaacttagtagtcactcccaccacccattctagttcagaaacctccacagagtaaacaataccttagttctaaagcagctctttaccctgaacagaaaggtacaggaagatgccaggggttttatttcacagaggaacctctaaactaattgtttataatgctcctgtgatgaacatgcagataaaggctccttgggatatcacccagcaagaaaaggccagcctggtctgcatagaaagttccaagccagccagaagtacaccatggtatcctgtctgggaggaaagctatagtatgcctttctcttataaaccaggagaaaagattataatgaaagaagtgttacagagtgtttacttgtggtggaatgtgttgacgtgaagagaaaatgaatgggattttattatcaagagacaagtgacgtctttcctctgtcaataagaagtttgtagcactgaggaagtacaaatcagtaccttgaggcttcttacaatagtctatgtgccagctgagtacaaagaaggcactcaatatgtgaccacacttgactattgcaacctagtaggaaaggacaatgttgaaatagtctgcatgtgttcacacttcaccacagatatttgatttttaccagtcttgttgcattttacacatttcctatatttatttcctggattttccatatttctagagtcatagaaatggacttaactttctttttcaccctcccaactcggaaaacctacccttcacctaatgagaagtagcaaaagacttgagagtaaataaaccatctccaggcttttttaaaatactctcttagcatttgataaatatcctaaaaatgaagaaaatggaaatgaggacgcatcagtattgcatgaaataaggaccaatctgtaaaagatgaattctgtgaattctagaagcttctggttgttgaatgtctgaaatttatttcagttttacacttggaaacaataattctgagtcacatttaggatgtacaatttatgacacagttaaaaactgattgaacagccatcataatactgcacacctgtaatcccaacacttgggaggcaggggcagggggattgccaggagtttgaggcaaatctagactatgtagtaaataccaagccagctagaactgtatcttctctattaaaaaaaaaaaaaaaaactaaaccgtgagggatccacagattgactgagacactctccacttcaaaaaggactgtgcaacccctcagctccttctttccttcttccttgtgtttttatatctccatgtgaggccaccaggaaactctgtgattcaccatggccagctgaatgtggatgctactctctgaattgaggtcagactctattggtggtcttggagcaatgacacaaacagatctcccccaacatttccccctttttgtctaaataaaaaggaagggtttttaactctaacatagtaaagctatatacaaaaagaacaattatcacatatttcctaaatagaaagaaaagatattaactttaacaaatgatactacatatgataagaataattatcaaacaagaattacagtcaccatgtccagtccatttgtacttggcaaattcagagaaaatacaccatagatagatatatcctgtctcgatgagtccaaagttttgtatccaatttctaccacgactacagaaaaccataactataattatctagtctccaaccccgacaaagaccctagaatggtatgttatctgagtaagcaggaagcacagagcaaacaacttgaaaaactgtgagaaatgacagaagtaactagtttctgggacagtcaccaaagattcctctgcaacattggggcatccatcttcagcatacaggcctagaatatctgacaggtttttctggaagcaggaattttgaaagaccatcccaccttgtcttgacaaagttcagcagttgccttcttttgtgttccacttgtccaatttgaacagcatattcaaagggcaagggcagtttctttgcccagtggcacaaatgacagcaaactccatgtgaaggttttcccatgcccatcatccccttttggagtaaattggtggtgctgacaggagcagacatgtcttgctgccatggaaagccctatgatattaaaacattaaaatgccatattcggtagttctctgaagtgtttgaagaccatctatctattgaaaaatgtctcttttcgtccttgaaaatatacctaacatgaaaaggactgagaaacccttcagcccctcctcttcctcttctctgtgtccttttatctccttctgagtttgtcaggaaactctatggtccaccctagacagctgattatggacgccattcattggaccaatgttggactctattggtggtctcggagcaatcaacacaaacagatctccctcaagaaatgagtttgtgaaagtaatggagatgctagaaacatgtctgaaatgagctccttttcttttattttgccttatttctcatggtaaagcagtaagtaaccattagataagtaccaaacagatgagttagtacaaaaaggaaaatctaaagtggggcagtggtggctaatgcctataatcctagcacttgggaggcaaaggcaggcaaatttctgagtttgatgccctgactacagagcaagttccaagacagctagggttataaagagaagaaaccctgtcttagggtgggagcagggggtaaaaaggaaaatctattaaaatttttaagctctccaacctcacccttacctggcataattgtttccatctttaatcccaaaactcaggaggcacaagtaggcagatatctgtgagcccaatgccaacctgtcctacatagcaagttccaagccaggaaggccaacatagtaaaaccctctctagaaagaaaaagaaagccgggcattagtggcgtacatctttaatcccagcacttgggaggcagaggcaactggatctctgtgagttcaagggcagcctggtctacagagaaagttccaggaaagactccaaaacaatacagagaaagcctgttttgcaaaaccaggaaaaagaggaagaaagaaagagaaagaatttccaacctcatgaggcttagttatcaccaatcacacagccaagaatgtcagatttctttgctaaataatatccaggctcaaatcatctaggcaattaaaaaataatgtccagtcaaatgaccaaattttaggatacttaacataataagcagaacagacatgaaagagcttcataatcttgactaagtttctaattaatcttcagtctttttgtcattgaaatggtatctttaatacaggaccactatctgttatgcaagtaaaaaataagacaaaatcagaagagactctgaatcccaaaagtattttgtctacttggcagcaggactattgggcaacaaaacttgcagtgggcaaacagaaagcctttgatttctcagctcttatatccacccatccatcacatgttcctctccatttgctgaaattttgcaacatgaggactaattgcattggaacatttccataagagtttaagatgtatctcttgataatggtgagaagaagaggaagcatttatctttatcaatagctcagaaagtggaaaaaagcttattgcagaagcttgatgctagtgtgactgtgagacatcttactgaagagtatggtatgggaaccaccaccatatatgacttaaagaaacagaaagacaaattgttaaaaatgttacagtgacagtgataaccaagaactaatgtaaaacattgcatagagccaaaaaagaagatctggatcatatgttgattggattcaacaaagaaaaaaaagatacaccactgatgggcttgttggtcatgaaacaagctagaatataccatgatgaactaaatattgaaagtgagtgtgaatactcagaaggctggctgcaaaaatctaaaaagcatcacggaatccagtatcttaaaatgtggtaggaagtgtatactgataactaatctgctgaaaattacattgatgaacttggtaagataatgtctgaagaaaacctcagctctgaacaaatttagtgctgatgaaacagtcctctattggtgctatgttcctagaaaagccttaaccatggccaatgaaaaggcaccaacaaattcaggaatgccaagcaaaagctgattgttcttggatgtgctaatgttgctggcatacacaagataaaactagcaatgactgggtgaagtccacatccaaattatttaaaagatgtggacagttcactagtgcattactatgcaaataaagtatcagtaacaagagaaatgttttcttactggttcaataagcattttgtggcagcagcaccaacacactgcacacaggctggactgctactgtttctagacaactgttctgagtgccctcctccagagcttctcatgaaaagtaatgttttcaggatttaccttctgtccaacatgacatctatgatacagcctgttgtggaatattattttaactatgtaaacatgtgttgcatttgtttatgcagcagaatatttctttaactgtgtagaggtgtgttacatttgtttacactgcatttgtttaaagacgtaaggattgtgtttaattatgtaaagatgtgttactggtttaccttgcctgcccaagacacctgattggtctaataaagagctgaatggccagtagctaggcagagaaaggataggtggggatagcagaaagagaaactaaatagaaggagaactctaggctcaagaaagaagaatgagccaggcggtggcgcacacctttaatctcagcactcgggaggcagaggcaggcagatctctggaagttcgagaccaacctggtctacaagagctagttccaggatagcctccaaagccacaaagaaactctgtctcaaaacacctctccccccaaaaagaaagaggaatgagagaagcgggagagaacaagggaaacacccagggcaagaagcctgccaactgctgccagccagtcaaacatgagaagcagtgaaaggaagatatacagagggaaagaaaagtaaaaagccccgaggcaaaaggtaaataattccagtttctaaacttcaaatgtttctcacttccatagagtacctagtctctaaagctttagtagcagattttatatagccatgcagtatttatcttagccagggccatctcattccattcttcctgtagctttatctgtctaatcactgcctttctttgtcatttaagatactcattcatgacaagcatagcagcacatacctgtaaccagcagttaagagcctgagaagcaggatcagcatgctgaaggccagtctggcccatgtactgagaccccgtctcaaaaaataatctgggggtcaggagatggcacaacagataaaggcaattgacaccaagcttgatgacctgggcttgagccgtagaacccagtttgataccccagaacacactttggtaaaggaagagcgacaactcccatgagttattctctgacttccccaagtccaccaccatgcctcacagcctctcccatctctcctcaaataaataaataaatgaataaacacaacaaaataagtgtaaaaaaggaagctgtatatggagacattaccccagtacttgggtgggggataaaggcagaagaatcaggagtttaaggtcatcctcaagatcagacaggatgacataagactcagttgcaaatggcggacacagaaaacttatcagtgtgctgaaagacatgatctattccgggtccctcccttaccaacactagggtaattttagtgcatccattctcagaattccaagaaggttaagaagatggttgctttcttactgctgtgaattctatcaccacttcattgaacctggatacagatctcattaaagcaacatttttctattacagtcctaaagctgtgaagactctatgagcccatttcccttatatggtatcggtgggagttaacaaatattggctcatctgaaattgccttcattaatgcttttattttgaaaatattgtgctgttctcaatgccttcatatttttattaagtaatctgattttgttttcttttgttttaaaatgcaatttttcctgttatccttcactttctgaagttttaccaagtgcccagatgtaatctggagttttaaattttgttttcctactcattttaaatagcagtcacaggcccttctactgatgttcctgtctttcattttctgtaagaaattttgttctgttatttctttgaatatttattcattattttcaccaaactgttcttctagaacttttttaaaattttcatgaagtatttggttgtttatggctgtgtcctgatgtttgcattgtcacttagccgctaagcctcctgtctgtgtgtaagtgtttgttgtgttctatatccttctggtggacacagggagaggagggttcccttctaggcgaacggagtttgggcatggcatctcttgcttctttgagggatacaagactcctagggtactacactgcttctggtgcccaagtggtactgttctggaattgcttttcctgtttgctacacagagcaataaaaggacaaaaagaactgcttgattgtcactgctgctgatgttacaaaatcatcttgactatttgatccgggattgcctcacactcccaagattcattttccccaaacttggagtaagactgaagctgccaccttcatgaatttagggcagtgattccttctttcttcccttcaatgttattccaatttaattttctgttttccatagttctgatccctttagacccatttgtcttataaatcagcatggtgtgtgtgtgtgtgtgtgtgtgtgtgtgtgtgtgtgtgtgtagatatctccttcatgtgttagggtttggatcataagaggaattatgtgtatttatattgctattttttgtttggtttttgtttcagatatgttctcactaagtagttttggttgtactggaacttactatgtagacaaggctagcctcaaactcacagagatctgccttcctcttcttcctgagtactgtggttctgcagaagttttcaaacccttttagaacaaatactactcttaaaacaaagtgtatagagagaattactacagtaaacaaataagagcaacatgattgggctgcagcaaaagggacagccttccttaatcatgaactactgattaatgtcttccttgtctactactatagctactgaaacccttcatggaatcttagaactctgaagatttacttagaaatcactgaagttatttatagttcaggtatatctgaacttcatggccctactagcccccattccttcccctcactctcctttgtgtgtgtgtgtgtgtgtgtgtgtgtgtgtgtgtgtgtgtgtgtgtagtttgaacccaggatcttgcctatgcttgcctatgctggtaaaacactaactaccactgagccccagaaataaataaattcttttaaaaatgttattattttacatgtatgagtgttttgtcctgtataaatgtctatgtactgcatgtgcacctggtacacacagcagtcagaaaagcatgccagctctcccaaaagtggagttatagaatgagccaccatgtggatactggaattgaacactggccatctgtaagatcaacaagtgctcttagccacttagccatctctctagataagatagctataattcatgtaaagtactagtaactagcattattattattattattattattattattattattattatattaaaatattgtctcttaaccttagaggcttgcctaggtactaagactagcttctcccattttttggaaatctcatattagagaaaatctttcaaacttaaagaagagggccggcaagatggttcagcatgtaaaagcacttgccacttaaacctaaatagaaattcctgtaaagatcaagctccagttgtttcaggactcctagactggtaagagcagcagttgcagactataactagctgccctgtagccactctgattgagatcacaagtgggtgagcccaacggtcttccttccagcaagacatcccatcattatatactaggcaaatgccttgtatcccaataacagaatcttaattatttttatcttgaaatgtccacatgacttaagcttgtgggaagctgtgtttgccagaaatagaatgacagctttttaaggaacacctaactggaacaaatctggatgccttctcatattgaaatcaatatattgtgtaagaaagatgtaaaatggagttattttcatgtagatttatttttcatgattttttcaaattacatccattcaagacataatttcatatatccacatagaacacttttaaccctatttttaaatttttattaggggctggagtgatgtctcagtggttaagagaacttcctgctcttgcagggttcagttcccagctcacagacatctctaactccagttccaggagacctgggaccttcttctgacctctgcaggcaccagagtgcatgtggtgcatacacagacatatgcatgccaaacactcatgcaataaggtgaaatcaagaatattatttgtgtgtctatgtgttagggaatctgtagcatgaaaaaaaaaagacccagagactgatattgggttcaagtttcaagctgaagatacagaagcaaagcagctggccactacctcttattctacctcagaccaaaggggcgatcctcagactgttccttacttcactgctcctaagaatcactcagactgctatcctctcctcagcgttcctggagaataatcttgagactgactactgaagaccctgctcctatcttttatacccctctagtgctgggattaaaggctctgttgctcttttagactgattcaatctcgtgtagctctgggtggctttgaactcagagagatccatcttcccttgtctcctgagtcctgggattaaagctgtgtgcctggctaatgtggctaactagtatggctgctttgctattttgatctccagcggctttaataaatcataaacaatataacaccacaagaatcaattctcttcatccactgtggcttccagggatgaaatttaggttgtcagggttgtaggcaagtgctgttacccattgaacaatcttgccatcccccttaatcctagatcaaaaaaccaaaagcttcacttttgttctagattgagttgtctttttacaacatcaatatgaattcaatcacttaaatatacaatcataaataaggagttaagctacaaaaaaaacttagtttcatttttacagtagtatttttatattgacctcaattgttaaaagcacatgaagcttgtaagaagctgagctagtacaggtaaagtgagtcctctaaataggcaaaataaagaattcaggttttcataatcgaagacttttggatcaacagttttgtttactcagtttaatgttttataagtagatacattaaacatttttagtatgaagaaaaattatgaatataaagaaaaatcctgaagatctggaagtccaaagacttccagattctcactgttaatattttgacttatttgtgtttttcattcctacacatgcatatgtaagtggatgtccaaatgtctttttgttacagttagctgtcttatagtcagagctggacaatattcatgtggaatttctcatgtttaatattgtagaataagtggttccttcatttaaaaaataaattgcagcctggtggcaacaaagacctgtaatcccagtactccagagaatgaggcagaaagatttccctgagttttaaaggccagcccaaactacaaatggactgcataatgagtcttgggtagtgtgtttactgtcttaagccactgagatctgaaagtcattttcatacaaccaacacttacatcatgagtaaaagcatgaatgggacctttagtagagtgttactaaaacaaaaatgtaaaataggtgacactgattgtcaattatgggaagaaagaaaactgatgctagagtcagaaaagttggcaatctatgatttgcaatagcaaagcacttggcaaaaatccttgtaataataacttagaaggcaagccatatgctcactaatctgtcaggtccaaaagaagcaactacaaggagccaaactgttcatatatattgactactgttggatagcaagtactagctatttcaaaaaggaaaaatgatgtcaagaatcttaaattaaactacttacagatctcaaattgtaggaaattatattgagaaaactggcagcaacaaaagcctgctaatttactattttatggtaaagagcacattagaagtgtaccttcccatcagtcctgactgcaccacagtgcctgccatgaaactgcatcatcaaagaaggtatgaatcaaaacaaaataaaggacaaaaagactgatatatatcaagaaagtatataaggccataggaaatgtttatgaaagcaatgtaaagtcttatgtttctgaagaaagttgtgtttccaaagaaaatacaagtctgggataaagactagtaaaggaataaaacaagaggagaagtgactccaaaatctatatacctcaaagaaagcctactcccattcaccaactttaaaatcaccatgtaagataatacacaacaaagggaattcccaaggaacaaaaccaaattttagtatggacagatgattgaaacaattttctcagctgctgtagacatgcaatggagttttatgctaccataagatgaaattgtgacattggcaggaaaatggaaataactggaaatcagcatatgaagtgaaataagccagactcccccatccgattatcatgttttctctcatatgtagaacacgcatgaatacacacactcaaaaattaataggaagtaaaggtattttgaaagaggagggaaaacagtgggagagagaaaggagaaagaaaggttaattgaaaagaatatgctcaaagtgcatatagatgaacagaaatgtcatcctgaaactcactacattgtttcatattagtgaatatgcactaataaattttttacatttatttatttatttgggggtgggagagctcacactaaggtatgtgcatagaggtcagaactcagaaaagtccgttctcccattagaatttgtgagtcccagagatcaatgtcaagattgtctggcttggtaacaattgcttttaaccatggaacaatcgcaccagctactccccactgtcattttttaaaataattattttctgtatgctttctcctttaccttctttaggtcagtgacggtttgtgtcttccaagttggataatgaagtctcccttcccccccccatactactgtgtatttgtagatgtagaaggcaaagggagtagaagtagagctcctgctttttaagttactcaacccaaaagaatcctacctgtgttagatgagctggttagatgttagacagcactactggggggcttattgaatatggtgtctgagtaatttactgagaatcatggtgggaaatggcattctatgtatgggaagaagaaaatttagtattattggctgaaaggagaaattggcagagaatggccatatgttttccaaattcatttcttttttccttatagatactaaattaaacattactcatgtgtgttagaattagccgagggtgaagggccaggtaatttaattctggccaattaaaccaggacagagttgtcatatggtagttcaaatattctgatggtttgaatgataatggccccataggtatcaatgtttgatacccagttagtggaactatttcagaaggattaggacgtgtggccttgatagagtagatatggccttgttggaggaggtgtgtcactgggagtggatttgagggctcaaaaagccaccaccaggtagtctctctgtgtctgttttatttctgtgtgtctctctgtctctctgtgtgtctctctctgtgtctctttctctgtgtctttctgtctttctctctctgtctctctgtctgtctctgtctctgtctttctgtctttctctgtctctctgtctctgtctctgtctctgtctctctctctctctccctctctctctctctctctctctctctctctctctctctctctctctctctctttcctatcaccatctaccacaggaacaaacttggttcactttaacatttttgcagtgcttgtttgagatttatactcctcataacatagacacaccgtggattatattcaggtacatcaacatcctccccaaccttacctcacatgtactttctatgctccttgaaaagcatagtgtgtgtgtgtgtgtgtgtgtgtgtgtgtgtgtgtgtgtgtgtgtgtgtgttcacatgcgtgcatttgtgtacatccagaataattttccttcttccttctttttcccacatatgtggcaaatatctactcactcttttaacacttggtattaaatattgcctcctcttgaaagtacctgttgccctccccataagaagggaaatgctccaagctttacactcctagatgaatgggaatttctcctccttctacttcttcccacatatatttcatgcctgtcattcttaccacagtaggaatcatgttatcttcaagttattatttctagcagtccaacatctgtcaccagtaggttccaataagtacttttctccaaatcaataattgtaactactgctaatttggcacaattttccaggcattgttcaaattgcttttcacatatcatctcagtttttgaacgattctgtacgataggtgttatcacaattttaaagttgaaaaaaactaaaacagaaagttttaggcaacatgcctcatatcatcccacagctagtcagttaatctcaagacaaagatttgaactaaatgccatttctataatcactacccaccccacatacattccttccctgtagaatacatatattatctcccctacactcctctcttttaaagttggctcaagataaacacccacaaaaatttaaagacacattgcaagataaagacattttctggatcttcttatatccagtggcaacttcacaatgtgtttcttgggccaagaagatggaagtttgaagggcatccagcagccctggcagatatggagtaatcgtgcaggtcaggtcaagtacactgagtgttccctcaacgacgtgcagctggagatcaatgagctttggccagttggcccagcttcacaatacatgttttaatataattttttcttttattgaaaatagcttttattctcacataatgtatcctgatggcaggttcctttacctctgctccttccagttcctcccctaacccttccccatccagatccactccctttctttctctcattagaaaacaaacaggcatctaagggataataacaaaataaaagtttatggtggtccatgcttttaatcccagcacttgggaggcagaggcaggcagctctcttgagtttgatgccagcctggtctacagcacctctattggatgcagctggtaaacatcttttcctgtactgtaggctgctgctttgtccaaatgacagtgtgctttgccaagcaaaagcttttcagttttatggcatcatctttcttaattgttgaccttagtgtctgcattaacactctcctgttaaacagtcttctccagtgccaatgatttcaaggctgttcccaccttctcttctatcagtttcagtgtatctgcttttatgttgaggtctttgatccatttggagttgagttttgtgtagggtgataaatatggatctatttgaattcttctacatacagtcatccagtctgaccagcaaatttttttgagaatgctgtcttatttccagtatgtatttctgggttctttattaaaaaacccaatgtccatatgtgtgtggatttaggtctgggtcttaaattctattccattgatcagtgtgcctgatgttatgctttttgaaaaaaaatatgctttttaaaaattaccaaggtatgcattttttctatcattccttcgatgcccaagagtctctcttcattcccttgtactctgttggtgtggcttgcctaagaagttcctgtttgagttcctaaatttctcatttccaggtttccgtccttttaagttttccttattgagtctatttccacttttgagttgtggtggttgaattgaatgcccccttaggctactatatttgaatgcttagtcacctgccagtagaactctttgataggattggaaggtttatgaggtatggaattattattagaagtgtgtcactggtggtgggctttgaggtttcaaaagcccatgccaggcccaaactctcttcctgctgcctgtggatcagagtgtagaactctcagctacttctccagcatcatgcttgccactatgctacttactgcggtgatatcttgtttgtactctaacaaataaatcttgcctggagatcagagtgtggaactagccactagttaaccacagaggccaggcagtagtggcacacacctttaaccccagcacttgggttctcaagcctttgattccagtacttaggaggaggaaacaggaagtggtatggctgggcagagagaggaatataaggtgggcagagacaggagctagtctcctttcagtctgaggattcagtagatgtaagaactgtagtgaatgattgctttacttttctgatctttcagctttcaccctttaatatctgacactgggtttttattattaagaccaatcagaattcatgctacaccccatcatgataataatggactaaacctctgaaactatagtctggcccccagttaaatgttttctaagagttgccttgatcctggtgtctctgcacagcaatagaacagtgacttgaactattttattcatttccttccactgtttttgtgttttcataggtttctttaagggatttattcatttttaatgatatgatcttttttaatgatctctatcatattcataaatgttattctaagatctttggtgcttcagctatgttggaattctcagtgcctaatgtgcctaaccaggatctagttgagacatattgcctaggctattgttatgtttttatgttgccatctaggcatctgggtttgggaagattgaaattctagatgcaaaacatcaccacagaaaccaaggaacaaagcactggtccaacaaagaccagaacaggtatcagcatctagcctctatggctaactaatgtggctagctttgcattctgatcttcaggaaagctttaagatgagaatctctcttggctctcttatgatggtattgatcttattagtgaaggtttccatcctaattgactcctataggtcccatcatactggcaagtaggacattaggactataacagttttgtgatctgtggtgatatctcgctaatacaaataaagcctgtctgaaggtcagagaatagagcttgccactagccaaccagtctgaaggtctgtacagacagacagaaagtgagatggcagggcagaagcagtcggtagggcatgagactcttaatcttagtgttgtgacaccatttgttgattgaagtttctgtcctgagagtcccacagtcttttagtcccaaatgaacacacagaggcttatattaattataaaccatttggcctatggctcagcatttttattggctagatctctattaattattaactcagttctattcatctgtgtagctccacatggtcttggcttataggtgatccccaagcttcttgctttcttggcagctacagggcgtgtaaggataaatctttccaccagcctcctgagccccatcgccacatggttgcccaaaataacacacagattaatatcaggtacaatgctgctggccaatgactaggatttcttttttttttaaaaagaataaacaaaattttatttaaatagaaaaaactaaaaatgataatttatagaagattgtacctagtgtatatctgcaataattttatttagcaaattaaattcatagtactcagtgtcaatgaactacaatgaatgattaggatttcttatctgctagctcagtcttaattatcaatcataactatatattttataaacttatcttattgaggatgctggtggcaagtgtcctgtcttcccgggctcacatggcaatattctctactacacttcccagaatcctcctcaattcctagtcctacctatcttgctttcctattggccaacagtgctttattcatcaactaataagacaaacatatacacagaaggacgtcccccatcaaggttgtctccctcactctgcctactacctttctctatccctgttcagttttcccgcctggctaaatcctgcctgtccattggccaaatcagctttattcatcaaccaataaaagcaacatatatttgcagcatacagaaggacctcccacatcagtgatccccactgagccagacccaccatttgtagtcatttcagacatcccagtcatcatggaactgagtctgtgctgttcttcctgggtcctttttaaatctcagattcatggagtcccaaaagatatttaaatgagaaacacctgttgaaaataaattcaaataatattgctaagtaaaaatgacagtggaccattgttttgaactaagtagtcctacactgggccctgacacctcaggtcaaaaatcagactctggctgaatttctaagccaccaagggaaagactaagctgtttatcttacctaaaagaaactaggattagaaagataacatcaaaatttcttcaattgcccaattgacatgatgacatgctttctgacttaatccttacacagaaacagcaaacctgaactaacccataggttatttctctattgtccactatccctgtcctagcctttaaaaaaaaaaaaaaaaaggaactttgaagtgaccaaatcgggtatgctggcacatgcctgtaatcccagcagacaggaggattgcagtgatatattatttatggtttattcaagcttacctgaggattcagaaagcaaagtcactcacaagccatagttagaaactaggaggtggtggtacacacctttaatcctaggactcaggattaagaggtagactgatctctgggagtccaaggccactcagatctacacaagattgatccaatcctaaagagaaacatctcggcgcttgggatcacacacctctaatcccagcattagggaagtatgtaagacaggcgaagcaaggtctcagtatcaggcatcaattctccagccatgttcagaataggaatgccccagcctgttagaggtaagtgttctctggtagcttggctggtttgcttccctgatcttcaggttgaaccccaatatctgtctctgggtttctaattttttgtgttacagaggattgtgagtttgaggacatcctggtttactcattgagtcctaggccagtgtgggctattaacagacatcctggccaagctttggttttgtgttttattattttctgctttcttcatctgtttttttggtcttaaagccaacttctgctcacttccttggagcacattttctctttaatgaagtattacccaattctgtaattaaaataaagccaatagaaactgttaagctgagttgtgagtttgtcctctgacgttagctactctagcccttgtgtccctgttcctttttcctaatgttaaaacacagatggttggaggggcaggggagaagggggggagagagggacctggggttggcatgtaaaataattttctttctaataaaaaaagaaaaaaaagcagttggtcattattggcagatcttaatcccaagtcatgtgtgtgagctctgtggggcagcagcagggattgcagctgaaagctggttttggaagggtctggcccagaagtctgggagtgaatgatttgtgaaagctagtcttcagttgccagaaagctctgtagccactctgcagtctctagtcactaccttagcctatcttgaatgtggtgatatggcttttggggtgtcttaacataggatcaaactctgctttgccatgtaagctcgttgtatgactctggacaacctcatgaacttgggcacactgaatactttcttttcagaggaagtcttactacgtagtcttgggggacacagccctcaataggtacaacagactgaattcaaactcgtggtagtcctcccgcctctgcctctgaagcagttgattgccaccatgcctagatttttttattttacattttctgttgttttgtttcttttgcacttatagataaggtgacacccagtaactcaaatgggccttcctcacgttacagcccaggctgtcctcaaaatcatggcaatgatcttgttggagcctcccacatatggagattattacaaccatgagccatcatgctgaggacattttttaactagtgtttgttgagatggggtttcatgtatcctaggttgaccttgaactcactgtagccaaggtagatcttgaacttctgttcctcttgcatctacttctcacaagctcagattacaggtctgcttaactgcacaatgtttctgtggttctgggcattgagtctagctcaatggtatacacaagaccactgttccgtttccagccccacaggaaaataaaagtggggatcaaaagcacttacctttgtagaccactagcagtaatgttttcaaatattaaatgatgtttattttcctagcatttattaataaggtcgagctggagattagtgggcattctacagatggcattatattccttactatcctcaagtggtccctcaattgtcacctataaaattaatctatatccattgtttcatatattttagccttcctcaagcctttatctccctttgccattaatttataagctaatgatctaaccttatatgtcactgataggagataaagaagtgaaagtattttcctattactagatctagacatcgggcctgaaaaatctacaaaacaaacaaacaaacaaaaaaaacaaaaacaaaaaaacagttcctgagtaggctcaggtcctacagcatataggcacagctcttttaagaggccttgctactgagcactgggcagcatgctaccccgtggccagagacaagataagaaaacaaaaacaagcaaacaaacaaaaaacaagagagctgggctggatagaccagcttcaggcaggggccctgcaggcatgaggctctgctctcactgaccgggaaagtggtagagccacctcccaggacacttgctaagaggaactgcactgtagagggtctagccaccacagtttgtctcctgcagtcagagaatgctgcaagtgtaaactcaggtccaggctgagaaaacctctgaataggttacagtgtgccttaaagtgtgctaagatgctaaagaatgaaaaggaaatggcatagacagtcacaaaaaataaatagttttaaaataataaagtctttgaagagagactaaagggacataaaaggaaaaagccacgtaaagatcggaaatactcagggtatatggatcctgagtggtgttttgttaactttgatttttttaaatgctaatgaacaaaaaacaatggctgctgagaaacattggattatggaaactgctatattaaaccaatccgtttattttaaaaatgtcttaacttcagaatgaaaggaaatatgtagcattgggggagaggttttgcttttctttgcacaggaaatgaaaagctatggattccttcaaagttagcaaagatcagatttgattggggagatctgctgaaaatcttggctacagacatgaagaaaagaaaaagaaaggaaggaaggaaggaaggaaggaaggaaggaaggaaggaaggaaagaaggtgatgtatatgctgatccctctacatgggaacagctttgaaactggatgagacatgaaaaatcttgttagctacatgccatcctttcatgcggcatggatagagtttggttccacagtctaaacagcctgataaagttgacagctgccttttccctgctcaaacatagagcagaaatcgtctccagctgacttgcgccttgtgcacactgcacatcccatacttgtgttaatgcagatatatgttaccgttaaaagtttgtgtgtttccagaaaaaaaggaccagacactaatgaaaacaagtagccccggtaatccagcctctctgaatgacggttgcagtttcctcaaaattctgcactcagaaaaactttaaaccagctccttgaaatgatccagcttcacagactactcaagccaagactccagacaagctctatactttcccatcacaccgaggttaaacaaaagataatacagctgtctctccccgaacttgaccattgtcccaattttctcaggcttcccttgagatgctgttgcgcctaaacaacaagaagcagtctagagaacacaatgaccacattcccaagaggtggggtggatggtttttggtcactcaatggcttgtggatgtttatcatcatttagggggtttggttgcaaattgttgctggtcatggtcaggggaaaagctgagcaaaggagattaaattcaaggttctgtttctgaaagaaaaagggagaatagaatatagaaatgatgagataaaatggtaaattgttgagtctacttttgaactaaacaactactagtctcaaaactttacattggtatggatttttgtatattgatacaaatttaaggttatttttgttatattgtatatatgtgtctattcttgtttaaggtattgtaagcatgtaactcatagttcttgaaatctatttaggataatgaaaaagttaggttagtagacagtcatctctaataatcaaactgtaagctagccccagtggaatgctttcttttgtaagagttgcaatggttatggtgtctccaatagaacattgacactctgctccccattgagccatcctgtcagccatagctgaaataactttagaaggtagcaggatgactgtgacaagtgtgaggactttgtgacctctacagcaggtcccaggttagccaggggtacatagtgagactatatttaaaaatttccttttttttataatgagaaaccataaaaatcagctgtttgaagagaaagtttcttccattattattaaactatctagcaggtacagacaacaaagaaaaggcaaatgttttatatatcccttggtctaccactatccaaaatagagaatacatacatcaaaattctgtaataataatcaattaaaaaacattaattttaggctagggatatagctcagtgacaatgtttgtaatgaatgcatgcaacccaggtctctagcaccatgcaaaagacagaatgaccttgcagatttcaacatattttatatgttttgatacattgccaaattacttattctcagatttgttccattgttagccactagcagcaacctcacattgctttatggttggtttcttttgtactcattacatctgtgttgctgtgttagggtttctatagctgtgaaaagataccatgaccatggcaactcttgtaaaggaaaacatttaattagggatggtttcagtttcagggatttggttcattatcatcatggcaagaaacatgatagcaattgggtagacatggtattggagaaggagctgagagttctacatcttgatcccaaggcagtagcaggagattgtgagccacactgagcacagcctgagcgtatgagaccacaaagcttgcctccacagtgacacacttcctccagcaaagtcacacctcctaatagtgccacaccctatgggccaagcattcaaatacatgagtctatgagatctactctttttcctttttttaatgtttattttagaaacaatcttattttacgtatcaatcccagttccctctccctcccatccttccatgctccccactgaccccaccaacccaccccccatccactccccaaggatagtgaggccttccatggggatcattaaagtctgtcacatccttttggggagggcctaggccctttcgtgtatctggactgcaatagtatccctccatagggaatgggctccaaagtccatttctgcactagggataaacactggctccactgttacaagtcccatcgactgcccaggcctcctagctggcacccacattcaaagggcttggtttagtccaatgctggttccccagctttatgactagggcctctttgtcctcaataggtcaggtcaactgtttctgtgagtttctccagcatggtcttggctcttttgctcatccctcctccctctctacaactggattccaggactatggctcagtgtttagctgtgggtacctgcttcttctatcagctactggatgatggctctaggatggcaaccaaggtagtcatcagtctcattatagggaaagggcatcaaaggcagcctctccactactgcctagattcttagttggggtcatccctgtggatccctgaacatttccctagtgccagaccttgatctaaacctatactggctccctctgtcaaggtatctcctttcttgctctctattcctcacctgtctcagtcttcctgatccctcttgttctcctcccccctcctcttctccccttctctttttcctatctccctcctctttacccatgctcccaatttgctcaggggttcttgtccctttccccttctccgggggaccacgtgtttttctcttggggtcctccttgtttcctagtttctctggaggtgtggattataggctggtgctttgctttgtgtctaatatccatatatgagtgagtacataccatacttgtctttctatgattgggttgcgtcactcaggatgttttcttccagttcgattcatttgcctgagaatttcaagattccattgtttttcccccctgttgagtaatactccattgtgtaaatataccccattttctccatccattcttcagttgacgggcatctaggtgaattccaggttttggctattacaaataaatgctgctatgaacatagttgaacagatgtccttgttatatgaatgtgcttcttttgggtatatgcttaagggtggaattgctggatcttgtggtagactgattccaattttcctgaggaatcgccatactgatttccaaagtgtttgtacaagtttgcactcccatcagcaatggaggagtgttcctctttctctgcatcttctccaccataagttatcactggtgtttttgattttagccattctgactggagcaagatgatatctcagagttggttttatttgcatttccctgatgcctaaggatgttgagcaatttcttatgtgtctttcagctattttagattcctctgttgagaattctctatttagttctgtaccccactttttaattggattattgggtgttttggaaactagcttcttgagttctttgtaaattttggagattatccctctatcggatgtggggtgggtgaatatcttttcccaacctgtgggctgccattttgtcttgttgactgtgtcctttgccttacagaagcttctcagtttcaggaagtcccatttattaattgtttatctcagtgtctgtgctacaggtgtaatgttcaggaggctgtctcctgtaccaattcgttcaaggttacttcccactttctcttctaaggggttcagtgtggctggatttatgttgaggtctttgacccatttggacttaagttttgtgcatggcggtagacatggatctatctgcagtcttctacatgccagcatccagttatgccagcaccatttgttgaagatgctttctgtattccattgtatatctttagcttctttgtcaaaaatcaggcattcataggtatgtgagttagtatcaggtttttcaattcgattccattggtctacctgtctatttttgttctagtaccaagcagtttttaggactatagctctataatagagcttgaagtcagggatggtgattgttggatttttgcttaaattagaaatgaagaagaggagcaagatgagacatgagactattagacatattaaccagtttattataggccctgcagagtacagagactgagagagaagaggaacaggcttaatggctgaccaccacagcctgtcaccatagagagacagatagagcatatgagaagagacagagagaaaagagcataagtgggcaggggtctgtcttttaaaggggccctatgcacctgagtgaagacttagttcccatggaaccctgggctgatcagggtacttcatgagtggattctgccagataacagaggcaagccagcataatgcctgaacctttcagtgatacctccggaagttcctttattgtacagggttgttttggctatcctgggtcttttgtttctccatataaagttgagtattgttctttcaaggtctgtgaagaattgtgccggtattttgatggggattgcattgaatctgtagattacttttggcaagattgccatttttactatgctgatcctacctatccaagagcatgggagatctttccattttctggtatcttccttaatttctttctttaaagactcaaagttcttgctatacaggtctttcacttgtttgattagtgttgccccaagatattttatgttgtttgtggctattgcaaaggtttatgtttctctaatttctttctcagccctcttatactctgtatatagtagggctactgagttaatcttatatcctgccactttgctgaatgtgtttatcagctgtaggagttccctggtagagtttttccgggtcgctatgtaaactatcatatcatctgcaaacagtgaaagtttgacttcttcctttccaatttgtatcccccttgatctccctttgttgtcttattgctctagctagcaattcaagtacaatattgaagagatacggaaagagtggacagccttgttttgtttctgattttagaggaatcaccttgagtttctctccatttagtttgatgttggctgctggcttactgtaaattgattgctttcattatgttcaggtatgctcctcttatccctgatctctccaggacctttatcatcaaggggtgttggattttgtcaaaggctttttcagcaactagtgagatgatcatgtggtttttcatcttcagttggtttatatggtggattacattgatggattatcatattttggaccaaccttgaatcccagggatgaagcctacttgatcatggtgggtgatttttctgatatgttcttggattcggtttgccagtattttattgagtatttttgcatcaatgttcatgagtgatattggtctgtagttctcttccttagttgtgtctttgtgtggcttgagtatcaaggtaagtgtagcctcattaaaagagtttggcaatgaaccctctgcttctattgtgtggaacaatttgaggagtattggtattaactattctttgaatgtctggtagaattctgcactgaagttatctggccctgggctttttttggttgggagacttttgagatttccttaggggatataggcctgtttaagttgcttatctattcttgattcaattttggtaagtgatatctgtccatttcctttattttgtagagtacaggttttcaaagtatgacctgaagattctctggatttcctcagtgtccattgttatgtcccccttttcatttctgattttgttaatttgcatgatctctctctctgccttttggttagtttggataaaggtttgtctattttgttgattttctggaataaccaactctttgtcacattgattctttgaattgttttctttgtttccactttattgatttctgccctcagtttgattatttcctggctctactcttccggggtgaatttgcttccatttgttttagagctttcagttgtgatgtcaactgtctggtgtgactattctctagtttcttcatgtgagcacttagagctatgaactttcctcttagtactgctttcaaagtgtcccatatgtttgggtatgctgtgtctacattttcattgaattctaggaagtctttaatttctttatttatttcttcattgacccaggggtcgtgtaattgcgagttgttcaatttccatgagttggtaggttttctgcaatttgtgttgttcttgaattctaactgtaaatcatggtggtctgataagacatggtattatttcaatttttttgtacctgttgaggtttgctatgttgcctagtatgtggtcgattttagagaaggttccatgtggtgctgaaaagaaggtatattcttttgtgtttggatggaatgttctatagatgtctgttaatcccagttgggtcaaaacttccgttagttcctttgtctctttgttaagtttctgtctggtggtcctgtccagtggtgagagtggggtgttgaagtctcctactataactgtctgaggtcttatttgtgatttgaattttagtaatgtttcttttaagaacattggtacctttgtatttggggcatagatgtttagaattgagatttcttcctgatggatttttcctgtgatgaatatgaaatgaccttcttcatctcttttgatttattttagtttgaagtctaacttgttagatactaggatagctaacccagctcatttcctgggtccatttgattagaatatcttatcacaaccctttactctgaagtaatgtctgtctttgaagttgaggtgtgtttcttgcatgcagcagaaggatggattctgtcctcatattcattctgttagcctgtgtctttttataggcgagttaagtccattaatgttgagggaaattaaggaccattgagtgctttttcttgtttgttttttatttgttggtagtggtattgtgtgtgtatttaccctgctttgtcttttggcttttggtaaagtgggattatctattgcctatgtttttgtgagtgtagttatcttccttaggttggagttttccttccaatactttttgtagggctggattagtggttgtgtattgtttgaatctggttttgttgtggaacatcttgttttctccatctatagtgatagaaagctttgctgggtatagtagtctgggttggcatccatgttatcttagagttggtagaatatctatccaggttctctggctttcagagtttccatggacaagtctggtgtaattctgataggtttgcctttatatgttacttggcctttttcctttcctgctcttaatattttttctttattctgtatatttggtattttaattattatgtgacgaggggactttttgtggtccaacctatttggtgttctgtaggcttcttgtacttttattggcatttctttcattaggttgggggagttttcttctatgattttgttgaatatgttttctgtgactttgagttcaagattcttcaccttcttctatacctatcatccttaggtttggtcttttcacagtgtcccatattttctgaatattttgtgttaaggatttgttggacttaagattttctttggttggtgaatctatttcctctagtttatcttcagcatctgagattctgtcttccatctcttgtattctgtatgtattcttgtattcttgtattctgggtatgcttgcatctgtggttcctgattgtttactcagcttttccacttccagcattccctcagtttgtgttttctttattgtttttatttcagtttttaggtcttgaactgtttccttcagctgtttaattgtatttccttcactttccttgatttcttgcatcttttggtttgtcttttcttccatttctctgaatgatttcctcattttctctcttagggtctctatcgtctgcatgaagttgtttttaaggttgctctcttctgcttcatctgtgttgggatgttcaggtcttgctggtgtaagtccttagtctctggtggtgtcatattggttttcctgttgttggatgtgttcttatattgttgtcttcccatctcttcttccagtgggtgcaggtggtgtctctttctttccaagtgtgtatgggtccaaaggttctcttctagtgggttcaagaggatctgatactctgatgggtctcaaggtggatgcaggcaggtctgaggcactcgctgtccaggttggtgggagcaggactagcactgagatgtcagcagactcagggttgcttggtcctcaggggcagagtcaacctgcctgcagaccccaggatagatgttcccagattgggcaggcgaagttggccccaagtcagggaccaaagcagctcacctctgccctgagtaggggcaggagtagtccagccatctcagtagactcagggttgcttggtcttcagggacttagtcaacctgcctggagaccccatgacaggagttcccagagtggacaggcggaagttgggcccaaggtaggggccaaagcagctcacctctgccctgagtgggggtgggagtagtccagcgatctcagcaaactcaggagtttttggtcctcaggggctgagtcgctgcaccccactttttaaaactcaggagtttttggtcctcaggggctgagtcgctgcaccccactttttaattggattgtttggtgttttgatggctagcttcttgagttcattgtatgttttggaaatcagccctctgtcagatgttataagatccattcttattcaaaccaccgtactgtgatagaacaattgacagaagcagcttcagagagggagaacttatgttactcaaggttttgaaggactaagcctatataagtttgtcctcacatcatagagaacaagaagcagagagacagatggaaagggatcaggcacaagacccccccacacccacacacacacatacacttatgtaggactcaccctcggtgatttaattcttacagctaggccctgtcttttaaagtttccagaacctctcacaatagtatcaccagctggggatcaaatgtttaacacataagtctatgggatgacatgtcatattcaaaccataataaaatattgtttttatcagaacaaaaatatttttgagtcggggtcttgctaagtagccctgggtggcctgaaactcactcactatgtaggctaaattagccatgaacttgaggtcatctttctacctcttccttgtgagtcctggagttataggtctgtattaatatgcctcaattctaaaatatttctctaccagtttacatgatctttcttgtactaccactgtatcaaatgtctaccatgggctgagagatgggaatggatggagttaggtcatccaccttcttccaaagcttcactatcatttcctgaagtcagctaatgactgtcttccagaataaaaaagtacattccattccccaactcccccaccaaccttgacccattcatcttgttatctgcctgctcatctgtaaccttacaatatcctttacagtcactcgagttctttgagctactctagttaataatcaaacctaaggagaaagtcatgagaactctgattctgtatctggttggtcagaaatagaggccacaacctggcacttgcacttagcattcggtgacagtagaggtcttgtgagactggcatcttgacctgtggaatctgaaaagtggcagaactgaattgaattgcaggttgatgatactgctggctatttactttgtatatgtgtgatgggtaggaaattcctatacatcttggtcattggagtgttgtgggatgtgttaaatatgaaaattagaaaacctggtagcttcatttgcagccaataaacttcactatttgtagatgtgtaggggaaatgttatccacaccttcttgggggctggcacaggtgatgcagaccacatacacttgggcatagtcagagtcacgtagaaagaccttaaatatgagggtcgcatgcatgcagctctctcttttccctgacctgcctagtggtgcaagactgtcgcatgagaactttgtctaataaacttctgctcatcaaacctgctctgactccatcacgatctgcatatattgtgtctcaaattcccatacatcttggtcataggagtgttgtgggttgtgttaaatatgaaaattagaaaacctggtagcttcatttgcagctgataaacttcattatttgtagatgcctttgtctggaaaacaaaacaggtaagacaaaccaaagggcctatcatgtaagggcctccatttccatcattcttgaggatgtatgcacacactctctttaccagaattcccagtgttgtgatttgaataagaatggcctccataggctcatatgtttgaatgtttggaccacaatttagaaggactgggaactgtggccttgttggaggaggtgtgtctctaggagtaagttttgagctttcaaaaatccaagcattagctctctctttgccttgtgatccaatgtaagctcttgactactgctacagatccatgcctggctggctgctgacatgatggtcatgacacctagaatcgttgattctggaaaaatggtatgcatgcaagagtgcacacacacacacacacacacacacacacacacacacacacacacacacacacgtgtgcatatacacaggtattcatttcctttcttccatttctttacctaacagctcacacttcaaccttcagttgtcaccaacataatgtgatatctttattactcccttcaaaatagaacccttttggtggtttgaaagaaagtagcccccaaagggagtggcactattaggaggtatagccttgttggaggacaggctttgaggtcttctctcaagcttcactcagttatggcagccagtcagcttcctgttgcctgcaagatgtggcattctcagctccagcacaacatctgcctgcacactgccatgctgcccttcatgaccataaatggacgggagctctgaaactgtaagcgagccactctcaattaaatgttttttgtttgtttgtttgtttgtttttttaataagagttgctgtggtcatgcagcaactcttcacagcaatagtaaaccctaaatggaagtcacccatcttccattccacttactgtgttttatactattttaatctgtctcttttaacaacccgtacttatttgctgacttacgtatttgctatcctctcccttctactctaagaagaatgtataatggtaggggacttttctcccctctcagttatcaacgtcatgtagtacttgccaggaatttttttttttttctgcaagagttagggtggatatcattttgggcaagtgttctagcactgagctatatagctggctctgtaaactcagtacttgtagcagtggccataagttaagattgttagggtctgagagtagttccataaaagaccacccatcacatatgcaataagcaagtgttttattaatccaagatgttggggtggcacatgccaaccacaaaagacgcctgagggctcctttttaaatcaggttaggggaatttcagggaggagagattagtcgggggctaattggtgggtttaaacaacagtttatgggttgctatatgattggttagtgggtcagtggttaggggcttttcagctgcagagtgggagaagccatctttaattctcttacacttgcacaagactgtggggcaccctctgattagttgcccttgggtttcggctttcccaagaactgcttgcttatctccagcctgttcattaaaatgaaactaaggcttggcccctgtcagggccattagaaacctgtcacatggctctctctggtctggctccctggctatctcaacaatatttgcttagctgggtggtggtggcgcacacttcaaatctcagtaattgggaggcagaagcaagcgaatctctgtgagttcaaggccagcctggtctacaaatgcgttccagggcagccaggactgtttcacagagaaatcctgtctcaaaaaaaataattgtttaaatttttttgtgtgtgtgagactgtaagagcacgcttgcttgctctttcagaggacctgaattcagttccttgtacccacgtcaggtagcttacagctgcatatcaatgcagccacagtgggagcggggacatctctggcttctgggggcacctgcagtcatgtgaacagagttaagaagaaaatagaactttaaaatagttcgtatgtaactatacatacaaaataagagaacatggctagaatttgggggtttataattattgttgtgttgctggggattgaatttgaaatctttactttattaataaaaaattattatcatttgtgtgtgcttgtgcaaataccctggcagaggtcacatgacaattgtgtgatgtctggacctttacaaggattccacggatcaaactaacaccgacaggcttgcataccaagttcctctaccagatgaggcatctcaatcaacacttttattggcttttttttttttttttgagataggatctcagtatgtagcctatgctggccccaaactgctagtcctcttgtgtctgcctcctgaatgctggggtcatgggtgcaaccaccatgtgcagcttaggaaattcttttaaggagaaaaagtctgttctgtaaacaagcgtctaagatgctagaatgcaaataccagtgcgaagtgaagttatccagttaccgttaggagctcaaggcagtgcaggcagtggctgttacacgggcactggaagtcatggcatcaggtctgcaggtaacgggaggagcagcttctctaggtttctctgaggatgcactacagcagagttagaaagtgggtgggagtggagaaaagcacctgttctctgtcctccatactgacaaaaacaacacatgaggcttctgtaaccagatgtggggatgggtgccctacaattcagttctaacgctatccagttggaggttacttatcacaggttaagtaaggactcggtaccaaaagacagcctctatctcagatactgagtatctgagatactcagcttgtgacctgtgctctaactggcaacatacgtggtatcttatgaacttcctccttggattcaaaattggctagtgtgaactcaggttcctaaggaaggagccatctatgcattgaggattctacatggctaaatgactatatttcctagctatggaaagttaaaatgctgcaggccaaagttaaattatcttgggctatttttagtccctctaaaagccactccttgctgtcttctatgaccaacctaacaagctgtgtctatcaaaacaaacaaacaaaaaaccctttaaaatatatttttagcaagccagtcgcttccaccaatctaaaagctaagaatatcactatagcatgagatctgtaacagattttcatgctttgccctaacccacctacctgatgtttctagaagtgtattttgaaagtgtcttgatttataactttttctcttactataaaggattcatgaaactgggcatgataactcatgtctttaatcccaaaactcaggaggcagaggcaggtggatctctgtaagttccaggctagcctagactccaaagcaagttcaagaacagccagagttacataatacagagactgtttcaaataaaacaaaaaacaagcacacaaaaacccatatgaaattgttactacactggaacagaaggaatctgagtctgtgttcctgggctacccatattgggctccacaataaactatcatttattcctttctatgttatagttggtttttgtttttgttcacacaggacacaattcatggaaatactttacttaggtctatccacttaccataaagaattcacatgaacagttagatgaaaggatacattggcaaggtacagggggcagtgctatctctaaaacctacacccgagtgctgggcttggtgctgcaggttgcaatcctagtactagcagaaataggaggttcagagttcaaggccatccttggctacatagccaatttgatggtaccctgggctatatgagatgagccagtctcaaaaagagagcaaaaattagaacaacatggaagctcattaaattactttctttcttattgaaaatacttttttttctctcatacaatatttcctgaccacagttttccctttttgcacttctcccagctctccccacatctcccctcccccctagatccactcctcctctgtttcctcttcagaaaagagcaggcctataagagagacagccaaatattacaaaaacaagatatgataagatgatgtaaaaatcctcatatccagcctggaaaagagtcctaagtacaggcaaagagtcaaagactcacccactcccactgttaagaaatcccacaaaaacaccaagctaatagccataccatatatgtagaggacgtggtgcagaccaatgcaggcctgcgcttgctgattcagtctctgtgagcctgttatccaagtgttttatagagtttagttgctagccacccaaagcttcttgaaggttgttggacagaactaaaaattcaaccctcaaccttctgtgatgattcatgtctaacaccccagtgtggagaacctgagagagagagttcaaggccagtctgggttaaagtggcagcctagttaaagtaagaacctgcctcccccattttctgccctcccttgtttattttctagagccttctctgtagcctgtctctggctccaccctgaactacctagttagaataaaatcagttatgatttaaaaggggaggggactgttattcatagaaaagatactctgaaccttcaataaaagccaagggttttaggaatttggtgacatgctcttgagactacagagtatggccctatgtcagaaaccaaggacagggtaagtcaaccaaaaagtttaaactaagccagcctggtggctcatgcctataattgtagcatttgggaggctgaggaaggaggatctcaaatttaaggctaaaccaaaaccagaacaaaattgaaaaccctctggattccaggtctgagagactcccttcccagtgtccatctagatggtatggtgggtgttgaaatctggctcgggacctggccttcttctgtcatctctaatggctcagtgaacactcttctgttggatcccttggtgttgagtttaggtttaacaaggagtcgccagtgtatctggtctcagcgctcatatgccagctgatgggatgaatgcagaaaagcaggggcggagttctttttctttttttgttttgtttttcttcttgttttgccaagctggggatagagccttgttttttgcttttgtttgttttttttgttgtttgtttgtttttttcaccagcttaagcttggcatatttgactttgttaccattttcccaagtaactaaaatctacaataatagtgtataattatggtacagtggatgggttttatctgcattttttaacagtaaattgtaaagagaaccagcaaatggggagacatgagaggagaacaaatgagaaaaagtataatacaaaactcagtatcttgtatgctaagctaaaaattaatttacaaagaatcaattgcaagtcccatatagagtcattaaattaaactctcaaaaactacggtaatggtgggtatgatgtcattacacctgtacacctggcacttgggagccagctggtctacacagcaagttccaggacagccaggcctatgtcagggtacagtcctgagtattagggcataaagttagcaggtagagatacgaggattgcctcaaattaaagggagccagctggtctacatagggagtagtaggccagcagggttacacaaggggatggagcagcagattaagcaaacaaaaagaaaaccaggtaacaagacaaaggtcatatttcagtgattgagcatctgccctggctggattccatcctgagcaccacaaccctcaattacgtatgcacgtgcatacacatttacacacaggatggaaggaagagaggggaagggaggcagggtgtggggaggaaagctggggaggagcagaccagaaggtcaggagaaaaaggtcaaaatgaagtcaggcaggctcatgcctacagtccaaggtgtttgggagcctgtggtctccctctttctctctcaggcaggatatgtagcccttgctgactttgtacttttggcaatattcctgcctcagcctcctgagtgctgggattacagaaatgagccaccacacccatctccgactccaatgccctcttttaaaaaagaaaattaagggttggagatatggctcagtcataaaaggcaacaaaaaaacattaaaaaaaagaaaattaaaaatgtaaaaattgccttctgggtgtagtatctgtcaccccagaacgtggggagtagagatgggagaatcaagatttccaggccaccattggctacatggttagctcaaggactagcaaagcaaacaaaatgcccactgtggtagcccatacccttagtcccaatactcaggaggcagaggcagacagaactttgaaagttccaggccagcctggcctacaaatctaatctcaggccagacaattaggactatgaactgagatgctgaaacaaacaaacaaacaaaaaaccaggaaaaattaaattctccactggagctgttggtgcagacctgtaattctttctactgagaaggctgagggaaaaaaatcacaaatccacagctcaactggctacagaatgagtttaagaccagccttgacaaattagtgacattctgcctcaaaatacaaaaagagtgttggggccctaactcagtgataaagcacttggttggcatgtgtgaagccctacctctaatctgcagaaccaaagaaaaagtgtgtaggccctggatcattcttatgacactgaggtgagaaaaccaatgatctctggttttctagtgaactgtaaccgtctgggggcagcaaagtcatcagctttgccttcgtagtcctatagtctgttttagggtcttcagcatagttcacacttaataaaagattgacaaatcatgaaccagcagagaccgagagaaatagcttgtgggcctctgctttcctcactcttagacaatatttgtcccagctctcctggagcacatgacggccgctcatgttcaccacctacacataccctggaataaacctgtgggatgtcacctggcttcccccaggctgggctgtaaccagggcactagcttgaaaggaaagcaggtgaggaacattctgtaccaggacttttgccctgtttgagtctgagccatttggcttgggcctcccttgccatgcctgggaatccagctggaggatgtgtccttgaagttactgcagtcctaatcaacccagttagagtctgtgagaattggaatacagagaagtggcaatgggggcttttagaaaatgcactgaacaaagtgcgaatccccatgaccagagagagcttcctggagatacagtgatggagagtcatctgccttaatgcagtatacacagcagtgggaagaaatagtgactgaatgagatgtgactgtgtcatttcattcatacacatttctattaactcacttcatctttgtagcaatgcagtgttagcccaatagtgtgaccatctaaaactcagggaacctgtgcattttattttcaacagtactagggactgaacctagaaccttacgcatgctttgctagccaaatgctttaccatggggctatatacatcttcagctctcttacttttattttgatgcaggcttccatcaagttttaaaagctggcttgaactaagtagctaaggcaagccttgcacttgaggtcaccctcccttagcctccttagtagctgggatgggatcgaaggcctgtgtcaccaggtaaactacatgtgttttatagccagaattaggaggtgtgaactggtacaggagtagggagagatgatagcctgaaggagcaagttgtcaaggaacagaactgaaagccaatgatgggcaggggcttgattacctaaggcaacttctcagagtcattaactaatataaactccaggaagcagagaagataggaattgaggttgagtcctagatttgttcttaacctgagttatttctctacacctcaattttcttgcctgaaaacacaagtggaaggaatggagtggacccattcattctgaaaatgtgattcttgaaagtgctctgctgggagaaataaatcctcaaaccaacgtataaaccctcggcacagttaatggcagttttggacccatggaagattaagttcaagggacaggtaggttaaccacaggtcactttgggaggattaaggtagagagaagttcacattgttgaagctggcttgtttaggaacttgaacacagatttttttttttttccagatgatgtggaacttagagaggggcttccatttgtactcagcctgctctatttacagtagtttggaacaatggcctgcagttttaaagttctctactcttttgtaggggacagaacccagtataggaagtatcctattactgaagggtcccggaatatagaaatatgaaattgtaagcccaaacacgttttggaaaaaaaaataaagctggcatatatatctatattcctgaacccttcactactgagttatttcccgagcctgactttaattttacatgaggctccgtgagcatttattatgtgccaatgttgcactaggtacttttgtgacaagagcccactttagacagatataaaagctgaggcctcaggatgtcaccaactcctaagtgtgtcccgcctgctgggcacggccactctgtttgcctattacaggtgtgttaagtactgaatttgtctttctacccagtgacagtaggaatccacactgaggtttaactccagagctcatggtgctggttccccttatagccaggggcaactttttcctccataaacaacaggatagggcgttgttctctgtttttttctggccgaggggtcttttctgagtgaggaatgtactttttatagtttggggtcgtttctgtttacttggtctcttccagcaccggttattcctgcgtagtttgtccttcactgttcttacattgtattcctaggtttcctctctgcaaaagacaactaaagaacacatgctgtttgtgtgcgtgtgccagccaaggaattccactcccctccttctccaaggctgcctacctttctataaataattgttctcttccctcccttcagacctcggagtagtttggtcacattaacgcacgcgcgccggcacacacacttttgggggcgggggtgtgggcatgagtgaccttgggaaggtactagcccactggggataggattagcaaacctgaaacctctgcaaatatttggcttcctcccgcattcctcccgaggcttctggctgtctcgtgcctacctcacccagtaccctttaggctcactctgccacacaaagcacgatccgcctatctcctcttcgcaaaccctgagaacttcattctgcacgttaaaactcgtcggtggcggtggcgggcaggactgggcatgctcagtggcggggacaggtctgggaggcgaggaagccgcatttgaagtggctcggcctcgggatgagggggaggcgggcgccccggccggggtccgccgaggttcccggggcggcgcgcgaggccgacatgctgcgggcaggagcagccagcccggcgcgcggaggccaagccgcccaagacacggggacgccggcgggaggaggggaggagcgcccgggccgccagcccccggccgcggcgctgagcctgccggatagcaagccgccgcagggaggatcgggagacaggaggacgcccgaccgtgacctccagcgaggtcccccgagccggagcccgcgcagcgcccgccagtccgggcatgggcgaccgcggcgcgcagcacgagcgcgcggccctgcagtccccgggggcccccgagggcgccgcggccgccgtggtgaacgggctgctgcacaacggcttccacccgccgcccgcctgcagccgcgacccgcctcccgcacgtttccagctctcgtccgagctgcagccgcagccgctgttctcccaacatgactctccggccaagaaatgccggctgcggaggaggatggactccgggaggaagaacaggccgcgtaagtcccgacgggaggggagcggccgtgcccgcgcttgagggggcggccaagcgcccgctccggaccgcagcctctagaggcgccgggcgctgaaggtgttggcccgcggtggttcctggctagtcctatccgcctgacactagctgtggctgcaccctcggtcacagtagagaaaaggagaacactctgccggctcttattggtggccgggagcatgcacccaactgatcttgggtctgggactaggcataaggcggactgtcacagccccggctcactgctcccttctccgaacacatcttttggggtttgcatctcaggctaccaaggttgccctttgaatcgcagagtaaccgccagtatctcgggcccattggcaagcttaagtctggaggcgtggagtttgacaatcccccaaatcacagcctattaaacagtttttctacacagccagtgagacagcctgtgtagagggagacacccactgacaccatgtgggccggaactgtgtggaccaatgaggcctgcaggtggattgttttatttatttatttatttattttctggagtggggagagttgagtgtttgtaattgtacagcgccgaaagtgcgtcgtttcataatccgaggcttgtatatataatgatagattgtaaagggtaccttccccacctggcattctgggatgtcagtttgtaggtagagtttagactttttttttctaagagtctgagcctaactccattcaagtggttacctctttgtgagtgtctttaatgaagtttataaatggcaaaaagcaaagtaagtagagtgcatggtaaactgaaggcatccaaacgtgtactggttggtgttgggaaatgactagactgggcttgaatttctgtaaaagtgtgatctttgacaaacagcacaactccatgaacaacaaacagccgttgttcatgattttctttcttttcatagcttttctgcagtgcatgagtttctaaaactttggaaaagttttttttttttttttttttcatgactgtgggtatccagtgtgtgcattttgtaggtctgaaatgttaagatgtgtgtgtaatttgggaattacacagcaggtttgatttggctgtggctgtaagacagatattcagtgtctgagtttttacatactttttaaaaatagtttttggaaaattattttgtgaacttcatattgactgctcttatttgtttgttttctgtgaagccacattttagttatttctctgactgctacatcttaaagagtttactatagttttcaatgacaatagctagaccctgattggaggtgggggagagagacaaaagaaaagaaaagaactaggtaggaatgttggcacagacctatgatcccaacgctggggagtctgagtaaggagactccagcttgagaccagcctgatctatgtagtgagttttaggggtggcagagaggtagagttgctggtttaaatcgtcttttgctttctgtgtttttcctttatcactgtgtggggtggatatgtgggtgtgagtgccacagcagccgaggaggtcagaggacaacttggaagagttggtctgtccttccaacctgtgggctccgtgaccaaactcaggtcatcaaactgatggtggcaagggcccttacctgctgagctgtctctctgatgttgagagacccggttttgtgatccagccccaggctggcctgtaactcgtggtatttctcatgcctcagcttcccgagggctagggtcataggactctatcgtcatgccttaccctgcacgaaagttactttttgaggaattgaaagtatgttatctaataatgatttgaagaaagagaaaaactaatctaagccttatcaatgcttacaaagctatagggattttttttttaaatgcaagaaaatgtaactgcctgtgtcagaagtcaaggggcttatgtttcttacagaaaagtaaaaacttgtaataattttttatttatatttacctttttttcctcacataggatctcctgtagcctaggctggcctcaaactctttttcttttttaactttaatctacatttattttatgctgaatttattcctgcgccataaatttttgtttcttcagtttcttctggggtatctttttcttctgtgcaacttcctcttctggctttggaacagtctgtcccttttcagtgaggatcatcccagtggggcagggcaagcgcatgtctgggttaatgagctctgtgagttcgtggactcatcttaggtgctttgttcacctaactgtgttcaatgactacttctaaacccttcagttcaacatgactctctgcatttttaagcatatgcagcaaaaattcagcactgtgttttggccatggaccctgtgtccagccctactgtttggcttgggcgcacctaccgactccactgttataccgccagaaggggcaaacattgcgtctttaaagtgacatctttaagatatatgatggcttttcgggatgtgcataccctcagtggcctgggcagtttcacgggtgttcttaaagtgaacccgaagatttgatcctcttgatttgcatgatttggtagggtttttttgggtgaagagagtagcgaaccattttcacaggttatctccggctgctcacaggaagagcggcctcaaactctttaagtgtagccaagaataagcttgaactccatgatcctccagtctctacagtaaaccaccacacttggtttatttacaactttttgtttgttttttttgaggcagggtctcactatgtagcatcctgggaacaagctagttgcaaagatccatctggctctgcctttggagtgctgggattaaaggcgtgtgccaccagccttgcttatttatagttttttaaaggattgaatcaaagcttgtttttcattatcctattatgtttaattttcttagattcaatcacacattaattttttaaaaaaatttatgtgtatgaatgttttgcctatgtgtatctcaatgtgccacatgcatgcctggtgtcaaagtaagaggaaggtgccagatcccctggtactgaagtccaagtagttatgagccaccatttaggtactggatccaaacctatgtcctctgcaagggcagctaatgttcttaactcctgagccatctttgcagccctgaacaggcagttctgaagtcaattgtgcatgccctaaggggtacacctgtacagttcactacctaaatgccttacttaaaaactaggtttagcccaggtgagatggcttggcgcttacaagtgcctactgctttcccaggagatcagggtttggtttctagcactcacatcaggaggctcacaactgtttgtaactccagccttaggggatctgacaccctcttcaggtctgtaaggacaccagtgcacatcccacagacacttgtacattgaaattaaaacaaacaacacacacacacacacacacacacacacacacacacacacacacaaaaccaccacccgccacaaaacaaaacaaaacaaaagtttgaactcagtgtgagggtgttctaacctagaaatcaagtcaggaagccgaaggagtagctcagtagaggaagatgtacatgtccagcgtttccaagttcctgggattcattcccagcaccctccaaaagtcagatcaattgcttgttggtttttactaagcaaggaaaggagaatgtcatctatttactgctcatctaaatgtcacccgactttccgactttatttactccctggagaacttttctaagaccaacttctttaccgggtttccttaggtattttgcctgcccatgctacttagcagtcatgagatcaactacggtaccagtgctcttagaatgttggagttgaactagatgttgtttctaatacttgcatgatgtttcagagctgacaaatcttgctacgtgacctctgtactagttgtctggtctgccatatgagtgagcatttcattatgttctctctctctctctctctctctctctctctctctctgtctgtgtgtgtgtgtgtgtgtgtgtgtgtgtgtgtgtgtgtgtgtgtgtgtgtgtgttaggtttgtgtgagtgctgggtattgagactagggcctcccacatgcccaaagcgtactgtcccacagaactactcctaagccctgcctgtctcccaccaccactacctctgttgattgccttttgttagttcctttgcaatgaagttgaagtctgattagaaatgatatattctcatgtactttgaaatggaaaagcatgcatttgtgattgatgttggagcagaaaaatggtttaagtggcatcaccgcctcactggatagttgcctctatttccgtagttggttttgtcaaaagacctgcaatggttcccagtgaagtatccatagagagggagggtcctttgatctggactgttgtgctggttttatcccccccccccgacagctctctgttatgttttattttggccaacatgtagttaatacttgtcagccatgctatttccagcaagaagctaaaaatcgtcctagtgattttatttagcatatgtatataaatggatcaaaaagttcacctggaaaagctggctcaaaagcacaaagcaggttccagtgagtttagatttcctggggtgctattgctaacaccaaggcagaagtctggctgactgacatgccctgctattctgatgttgtgaaacagaagtagcattgctggagtggtcagctcatttaaaaagtttggaaatgaatataattccaaagtgctaggaacacctgatgcatttgcagttgtataaattcacccctccctccctccagatgacttgggcttgaatttcagctgtgtggtcagagctagtcctcaacctttgtgtttcagactgagtgaaaggaagaaggtaatcagaccatgtggagctcgtgggaggatgacaggagacaatatggactccctcttacctgccagctgttacagctacactatcggccgccatgaatctcaggatgggcaatggagcagcaggtgctgcctcagactggcttcctttgagaaagcaacacagcctcagtcaaagagacggaattttattaattgcagtactcctaatcccatttatttgcttaagcctggccagccctgtcgcccacactatgctccatctcatgactctctcgtctcagtctgcagacagttggtattgcaggtgtgtccctccatcgctacaatatgccacattttaggaataattttgaatgttactaaattaagagtttgatagtatcttgttattgttgggtttcctgtctgtttttgaaacagacagtctagactggctggaactcaccacatggttcaggatctcctagaattcatggcaagtgtcctgtctcagcctcctaagtgctgaaattacaggcatgtgccactatgaccggcttgccaccttggttttttgtttgcctgtttgtttagttgttgttgattgaagcagaatcttgggatcccaacttggcctcacattcactgtgtaactggggatgacctttaggcatccatgtatttattatgttgtgggtattttgcctgaatgcatgtgtgtgcaccacatatatgcctggggcctgcagagaccggaagagtgtgtctgtcatattacatgggactagagtcgtagataatttcaagctgctctatcagtgctgagacttgaacactggtcctctccaagagaagccagtgctcctaactgctgagccatttctcctgccccaaccttctgatcctcctgtcttcaactggagtggtgagattactgccatgcctaggttttgtttgtttcattttcaagaatgggcttctctgtagctttggagcctgtcctggatctgtagactaggctggcttctaactcacagagatccacttgcctctgcttcctgagtgctgtgaattaaaggtgtgtgccaccgctgccaggctcaccatgcctaattttaattcaatgctagagattgaatttagggttttgtttattcttaggcaagcactctaccaactgagttatatccctactcactgataattagaaaaaacaaacaaacaaactgtgtgtgtgtgtgtgtgtgtgtgtgtgtgtatgtgtatgtgtgtgtgtatgtgtgaggcaggtttatgtggcggcactttatccataatcccagcactcaggaggcagagtaggaagatctgaagattcaggttagcttgggctatgtagggagttccaggacaccttgagctatggggagatttttgtcttaaaaaaaaaaaaagaagaaaaggaagaagaggagtaggggaggggaaagcggagaagaaagaaaggaaggaagaatgaatgaatgaattaattaattaattaatttagggagaaaaggaagagaaaccctagtgattttagatacaagggatattgttttggatgagacacagcatttgtggaaagtcttgaatgcttaggtggtactcagtactcagtatggaaggcacgcccctttccttccattgcatggtagcggtcaggagttatagccgatccaggctggtggctttctggtaaagggttccgatttcttctttcactcaaagagaacattctgctagcagaaagtggatgaatccgttatgtagtaacatgggtacaaacttgaagaaaacgaaatctgttatcagttttagctgcaattgtgaaagtacaggatctaaagttttaaaattgagttactgtgctcggacactcagcctttacttttaaattggccaatcagaaaagtcagcatgaagagaaatagggagaattttctggttatctgcagattacagatgtatctgtctgtcttttcttctttagtcataatcagtcgttccagacatacaagaactagtgcagattcaattacaaaatgtaagcaggagctaccttgagggatctggtcaaattgtcattgcctctctgttccttaacaaattttcctagcccaggctgaccttgaactcactctgtagaataggctggtcttgtctttgtgttcttccagcctcactgggattacaggcgtgtattgtcatgcccagctttaggtttgctgattatgttccagatagactgaaatttaaggcctaggatgagatggcttggcagcattgcctccaagcctagtagctcatgtccagtctctggaaaccacatggtagaaggagaaaagtgacttctgccagttgtcgtccagtctttacatgccaccctgcaccacacatacgcctgtcagggtgtgacatttgaataatttttttttctagatagtacagttgtcaagcttggtatcgtgttacttaatttatgacatctttcagatgcctcaagttgaatggatatttatgagtatgttcttctccctgagaatatatttgaaagtattggacgattcaaaagggtgagacaatgtgattgtttaggacagctatagaaatcatgatcctggccactgtgacttctctgtcatttggagagactcatggcagctgtggacgcctgggggtaaccatcattgagcaagagctgtgtgcttttgttccaagtttgcttttacaaaagtacatgcacgttctccattttgcaggtggggagaggctcagaggagtgaagtgacctgcctgaagacatgtaggtagagattgtcagggcgataatttaaacccgtcacaatgagcctgtcatttcattgggaataggaaccagttctgtaaaactaaaagcagataggtgcacgcagtctgtacagtgtttgcagtaagtttatctgtcttccgaagtaacaatagcctacattaaggagcacccaacttcctgtgtgttaagtggatcctttgtatggcgccctgtgaggtgagggatacagttgtctacaaatgaagaaactgaagacatggggtgccgactctactgggcaggaatgttgtggagttccagaaggtaagtgttctatagagaggagagctttggaaagatcagctctggattcagactccgattctcccctaacttgcagtgtagacttgggtgaggtccagactactctgaggcacattgattaacaggaatagaggtgtccatcttaccaaatatggaaaatttgtataaagtatatgcattgggtcacttgaggactgggttttagagtatcctctaatcccatcttctatcacctcctgataggagattttttccctaaagccctttgatgtttctagaagcagggtatatgacattcatagattgccccatgacaactcttgagatcaagcgggcatgtcttgtccaagagtgatgttggcaacttatcgagtaagagaaatgagtaattttatgtagctgctaatttggtgtcaggacaatatttttgtttcattttaaactatttttcaaattacatgtaagttacattacatacacatgccacagcaggtctgtggtggcccacaggaatgggttctgtctttctgtctcgtggcttccagagattgaactcaggtcctcagacatggcggcaagtgcctttgcccactgagccatctcatcggcccttacatagctgtttttaaaggaaatgtctttgttcttactgaaacctcagcctttgagtgagcagaagagatgagaagggttagaaaggtcggctcttcttttaagaactacatgaaccgagccgggcagttcatgtaccgaacaagattttggaacaggggcatctagctcttgggccatctttttatacctgttctccaggaattgaaaaaacaaacaaacaaacaaaaaacaaaaaacaaaaaacaaaaaaacagccttatagtcctctaataggtgacagatgagatgggtttgtgtaggtgtgtgttgacctcagctatcatgtgggcttggagtctctgcaagaactctacatacaggaaggctgtgtctgcataaacctgtgagccatggccagcttagacagtgccaggaacttgaagttctctggggctctggatgaacaattcctttatctttcaagattaactgtgctgggataaagaggcaagggtgggcttggtcagtattaaacttgatgagagtcaacagtgtattgaggcctcctgaaaaattcaggcactcaatacctgttagctatcattattggtggttatatagatgttcgaggtcaaaacctgcctcttctctccatgacttctatcccgtgttccttcatgatctctctaatccgtcttttatatgacagcctattagatattttaagatagctatattatcttaactcttcctctggatccttggtccctaaagaacaaagacccgtcaatactgtcatctgccaaaccccactcatttcattcaacatgggttgtattaggtaactggccagaattaacccaagacccaaagaaggcttcttgggagtgatgtaaattaagaaggcactgagcttagtggccttggacgcagatttaacgattccgatgagaccccataggaactaatcagttttattcccgtgggccaagtactgatgcgttttcagtttcctgcagcttcaagctggtggaacctggagcagttgcttagcagttacagagatcagcagagtcacaagtgtgtggctgaggatctgattgtctgtttgctaccatgtttctccaactacctacgctttaaagttttctctttatagttttttgagactgggtcttgttgcctcggctgccctggaactgtagatccccagcaccagtctcccgagtagctgtagttgaagatgcgtatcatcaagtctgcttccaactacctgtgtcccatgaagatgtttgaggccaaggtggtggcatgctggtaataccagcacttggtgggaaactgaggcaggagaattgtgagcttcgagtcaggcaggggtacatagcaagtcctgaacaaaataaataaagtcaaaatttaaaaataaacagataaaagctttggccaaggggttaatcatattttccctttgggggatgtcctttccctgtgatagaaagtttttattgttgtttttttttttttttttttgatttttgttttcgagacagggtttctctgtgtagctttggagcctatcctggcacttgctctggagaccaggctggcctcaaactcacagagatcctcctgcctctgcctcccaagtgctgggattaaaggcgtgtgccaccaacacccagcgtgatagaaagttttttattttttatttttttcaagatggaatttcatgaggccagagttgcctgaaattcttcctgtaatgtctctggggttacaggcatgcaccacccctggttgcatgttccatgtatcaaacacaggcccttgtgcatactaggcaaacacccctgggctatatgtccagccccttagtgaaggtttttactatgagaaaggtccagatgaaatttattctttgaggtgaccatgtatttgttgtagtaccataataattagactgtgactagcatcatttgggattatcataaacagaccggagtcctggtggtgtgctcaagcctgctcctgctggaggtaggactggattgtgtgcacatttgtaatttttcattcaatgttttttgactatggtggttatgtttacaccatgaaaactggcaagctggaagccaatcatgcatttaccagtactccagttaaagggacacagagcaaagaagcagagaagactaatcattaataccagttggattactgaagtgtttggcatagagagctggaggaaagaaagggcagctgcttttgctttgctgtgtcacagtgcttgaggatgaaaatcaaatgaggcaacagagatcttcattctttacttttttcctttgtgttttgagacaaggtttcactcttaacatagcctagattcaaactggctatgtcacccaggctggactgaacttaagataatcctcctgcctctgcctctttggattggttataagtataaactgccacacccaggcatccttttctccctcctccctccctccctccctccctccctccctccctcctccctccccctccctccctctgtctctccttacctcccttccccctcccttccttcttcatctttcctcatcctcctcttttcttctttgtgacaggatcttttgtggcccagacaggttaagaactattcattatgtagatgaaaatgatttgagtcttgatcatcttgcttccaccacccaggcaggtttcagggtactacctctgtgctcggtcacagattttttaagaaagaaagttattcaagccagggtgtgtgtgtgtgtgtgtgtgtgtgtgaggggggtgacagcatatgcctgtgatcccagcaggcatccagaaggtgaagactgaaggaattcagggttgtcctcagttgtaaagcacatttgagactgtactgatcaacatagttccaggctagcctggctacagagcatgactctgcctcaggaaaaaaaaaatagatggatggtagatagatagatagatagacagacagataggtagagacagacgagttcattgtaaagcaagaatgagagaacagtataggatgtagctcagtagtagggcatctgcctagcatgtacagggccccggctttggttcttgattcgggaaaaagtattccagaaatacttgagggtccactatgacatgaggatttaaaaccatattgtgatagtccctttcttcttgttagattcccattccaaacatagttaagcttggtgctgggttggttgatgaaggaggtcaaggagcttcactgtgcatgcactggagtggggggggcatggaaaagaagaaaatgtgtctattcatgcgtgtagatctacgtacctgtgggtaacaaagttttagccccaggaaaaccacaactttggatttagttatatgaatttcacgattcactgttgtttgaatgacttgaattattttgtccattatgatttggaaagaggcaagtatttgcctttaaatagctttaaacaggggcccatcatcctctctgaggtattggtttatttgaagcagatctcatggagacaggctggccccactcttgggatgtagcaaaggatgaccacaggctcatgattcttttgcctctgcttcccaggtgttgatcaggcctgtgccaccctgtgagatgagtcagggtgcagtgacctcagtatctttatttcatgttgttgatgttttttttgtttgtttgttttttgtttgttgttttctgattttattttttatttttttgttatggcaggtaaattaaagtgtgttctagccaggtggaaaggaaatggtcctgtttgtttctataaataggatctgggaggcaaaataggatgtctccagccaagaacaattcagattttgtttcaaagatcacctgttgtgtgtgattcccttgtcttgaaagaacatttggacagagttggggtttcagaatccttttttacttaggaaacatttaaccagtactcaaaactagataccagagtgttaggaactgccaagttctcgccactctgcttctgtaattgcaactcgtcaattttcttttcttttattgtaagctcagcttctctctttgcattactgactgttatgaaagtgaatctctgggatcatttcgtttcaattaccgtgttttggatatttttctgtaagataacttctctaaaaacatatcctgttattaccctaaaattagtaacatcttatattatgcagaattagataaatgaatttagttatttcatcacaataaaacttatgacgtctcacttacagaccaagtcataaaagtcttgtcattgtgttgttctcagagaaccacttggtttgcaagtgcctgttatttttcgtatgtgattaatttttaaccatttgtttgtggtctgagatttaaaacctcattcttggaataaaataatatcgtgccaaaaagctgcattgggatcattctcaaatcactaggatggaaatgattactattttcttcatcatttctgccttgagggagagattaagaatgaagagacaagtcagagtgctggcatacgtctgtaatcccagcactcccgaggcaaagggaagaagagtaccacaaattcaaggtcagcctgatctctgtagcgggttctaggccagccaggtctatagacatagcaagaccctgtttcagaaagcaacacacagacagattgaggactggagacctcaaagagagaaagaacaatattttctcggtatgggtgtaggggtgtgcatgtgtgtttgtatgttcttgtgtgtgcatgtatgtacattggagatcagggaacatgtatatacattaaagtcatagccttaagtgtcattcttgttcatacacattccatcttttgtctgagacagttcgtcatttgcctggaatttcaccaggtagattaggctaagtggccaagtgagctccagcgatctgcttgtctactgcccgtctcaccgtctttgagattatgagcctgtaccactatgtctagattttctttgggttctatggatctggatttcattcacttgtaagacaagtgctttagcaactgagccatcttacctacttccttttttaaatgtttcatatttatttgtttttgagacaaggttctgctgtgtagccctcaaactaccaaacttctcctgtctcagtcttccaaatactgtaacttgagaagtatgcttatatgcctggcaagagatagtggtaaaataattgtatttcctccttttcttcaaggttgccagaaaaaggccagtagaaacaggtggacaagctatcttgaaagtcactggggtacagcactgagtttaggcctgaatctggagtccctggattgctgaattttgtggaatttgccacactgatctttagagactatgactgtattgcaaaaacagacagagaaactgaatctacttagaacttctgtatttaagaattcacagggaactaaacaagttctgtaccatgtctgtcatctatgtgactgccagagttggtttgtttccatcagtttcatcaaaatatgcttcagaggcattttatacattcttatctttcttgacaaaatgagtatcatttaacatattttgatagtttagaggtatctttaacagaattttatactgaagtacaataatgggaagtctaagataatgcataaattacttgaatgtgctcattcagtgagaatttgttgtgtatagagtaggtgtatagagtagaaccttgaagggctcaaatatttttttcgaaactcttaattttgcccttgttgtttttgttggtttggggatatacgcagatgatacagtgcttgcgtagaattcactggccagtctgctctacctaatgagttccaggataggcagggatacacagaccctgtctcaaaaacaaacacctccaccaccaccaaaaaccccaacaaacaacagaacccgaccctgttaattgatgttcgaatccagacacagtgcaggtcaggttggttagctgtttcggttctgaagctgccttggatgggtttccaaagacctgtggtaaagcatcctcccagctgttatgaactgacctgcagttcttggcctgtagggagatgtcggaaataactgagtgggtagcacatgctccagtacaccacgctagcacgtgcgtaccagtttcaacgacgttgtagtcaagggttaggcgtttctacttggccactgctctcactttggctgaggtcaattacctaagaagtaaatgtgtaacctgccaggccttgggtaacgcactcttagcactggagcacttgctaaaaggcttgggtggcttttgatttttatatttatcaggagcagagtgaagagttgttaaatatttttagatttcagctttttatggaagactttctgtaaacctttctacactgctgaatcaattctgagtcaaatttccaagagggaaaaaaaaaaggctgttcaaaaacatttaggatttgcgcttgttcggtaaattggggttctgcctgtattatgtaagccgatagagtgggtacacaaatgggttgccaggcatgggacctcatgcatttgattgtagcctgagacactgaggcagggagattgctgtgagtttgaggcctatctggactatagagtgagatcttgtctcaaataaacaaaccgataaatataaaaataaataaataagtgatggaattcatgaaaatgaagctgttccataagacaatttcttacctttattctgttcaaaacattgtcatttttcttactaattactgtattagttacttttctgttactgtgatgaaataccaggaccaagaacaacttaaggaggaatccgttggggcatatggttccagagtggtagtgtccttaatggtatgcaggctgcaggggaaagctgtgtgattccatttcacccatactcaggaagcagacagagacaggaagtgggccaggctataaaccttcaactgcctgtgagtttcaaatacagaagcttatgggaggcgtttctcattcatcccaccataattaactctgaatgttgtggtatgatttgtaaatttgtgccaagaaagcttgcttttctctgtcttatatgggcttcagaggaaagatgaaaaaagaattccaaaggaagagtttgaaaacatttacgttcttttgttgtctgtttttttctgtatttgggatggggtgtcctttatcaccagggtggcctcaaactcaagattctcttgcagcagcccctagagtaattggattgtagactggggactgctcactgctatgctcagcaggaagcaccctttttcctccctccctccctccctccctccctccctccctccctccctccctcctccctccctccttccctccttccttttttttttttttttttgagacagggtgtcttgtaactcaggctcgctttaaacttgatattcagtcaaagatgaccttgaactttgatccttctgtccttacctccagagtgccaggacggtaggcatgcaccaccatgttctgttgttttgcgctgctgggactcaaaactgggacctcatgcatgctaagtaatcattgtaccaaattgagccacatctctaaccctgcaaacccttctgtctgtccttttttctttgttccttccttcgttcctttctgtctgtctttcctgttttctttttctttttttatgacagagcctatatagctctaggtgttctggaactcatagagatccacctgtttctgcctgttaggtctgggattaaaggcgtgcaccactgtgcctggctcctgcaaacattttggaacagccaaatgctggggaatctaattttttagctttgtttttttttctttctgtattatgcattgaacccagaactttgtacctgccaggtagctttgtacgccacccttcaaagtcactttttgtttgtttttgagacaaagtctatatatcccaagcttgtctggagccccctatatagtccaagatggttttgagtttgcagagatctgcttgctgtgcccatgagggctatgattaaaggcatgcatcctgctcaaagtcacatttctaacggactcatttttctcctttgtttatattcaaacatgtgggctctagacagatatattacagcatgacactggccacttatctaaaagtagagcataggctactgtaatagagacttcagaatactggacgttagcagctgggaagcatggatccatcccttctgagaacatcaggaagcttgctttattcttgagggagtcagtgatgatgggcaaaattgaatctcccatgtctcagtttttaggaagccaaaagcatatttagtctttttttaaaaagactatggaaaatactccatgttttgggaagattctttttttttttctttcccgagacagggtttctctgtgtagccctgactgtcctggaactccctcctattttctcttgatggagggttttttttttttttttttcctgactccttcacatttgatctcttttgattggatgccttcccagggcagtgctcaccgttcatacatgttaccacatttatcaacattttatcctctatctgttctctttgttttatgattatatcacataatttattcatgctcatcagttggtagccatttgggatgtttccacttgagagatgataatggagcaaggagcactcagtcttgtactcctcaccaacacttgtttctctctctctctctctctctctctctctctctctctttctctctctctctcatgacctcttactgagtttgaaatgctatttgttgttgtttgtttgttttttattggcatttcctggagctgaacatcttatgtacctattgctggttggagcacttaaacccttcagactttaacatcctatgatttataagttttctaagtttgagtcctatgtctagttaaaatatgtttctgccatggcttaaaagtgctggacttttgctcagtggtcgctagctgtaattggctgacctacaagtattgtagaatggttttaatttaatagcattttggtctcagacaatgtagatttcatctcttctttctacattattcttaattaatcattagtccttgtgaattaggaagaatgtaagtgccaagggggacatatgcattgctgtctaaattttgtttgctgcaaaatatctttctttgtctagggaaacaaacaagtaaagaccctattcattcagtgactaaatgagtaaaaatgcactggttctcaaactatatgaggcatgtgcttgtgaccttgtccttcatccagaattgccacaagagcagtcagaacactcttcttcctcctccctgtgaccccagccaagctttaatgatttactagactttcttagttgaggctgaaagaaacgatcaaagctcatttttggtagacttgttctgcttggtagtgctacctagcaatgctattccttccaacacctctttaattatctactctgtgacattaaattatcagtagcgtccctagagtaaaccagcatgctctggtggcttgcgcagacagaaagctaaacctcttggtggttttaactgggatttgtctaagcaggtaatgagattaccatcttgagccctagcacaaggctttaggaagctgaaggagctgtgcctgggtggactatgagttggtgaggtgggcacattaaagacagtcatgcaaaagcctggtgaacgtgtcccttggtatatctgggtgtggtcaaaacaacgggatttttattttatttggaaactaattttaattaagaaagtggggtgttatgtgacttttcctgggaaaacatactattatcctcagacccaacaagtgttttgacccaactcgagcttagtgagctactgagtttattggggttacttatagacgtgtgggtgacccgaaggcagctgcatcattaaaagacccctcaggaaagagtgaagactcatgaaagcagcatcccagaacaccatgtagtcagagcatagaagagtctcctccatgtccaagaatgatttctgcatctgtagccttcatgagggtccacgtgtatcttttaagttttacaaacttccctagttaagggcctgcctctcccttctaggaaggagtgtttcaatttggaggaaagaactgcacaacatggtgtcattaaaggaaggttgatatccatcttctattgcctctaaattgggcagacccggcagcttcttggtgagaagtaaaggtagtgactgcagctgaagactgcctaggaatgttcatgtagaataggaattgaattcagtctgcctctcccatgccctcctgaagacctggagcagaaatgcagggcttgacaggcagcaagagtattgtgtagaagatgaggtcactgaagtgacctctctttttttcctgtgactagtctcttctgtgacttctatcataaggctggcattgaatcaccaggactttgggactaaaaagctactctttctgggcacttgttttgtttgagtcttagtatcccaggctggccccaatctcagtgtctgtgtgagatttatccagggtgaagattacaggtgtgaaccaccaaggttgactgagaaatgtttcttaaacttttgagtttggtatttttggatcacggccagctctatcttgcttctgtctagtccaaatccaaattaagactctgattccatttactggctctagcagaaggatgccttggttcatgatttcctttgcccctgcaagagcattttgccttttgaaccctaacctcaaaacagattttttttcccttaatgttggtatttcagcttgctttgatttcatgtggttctctgtgttaaggtcagccagatggactgcaaatcagggagctgtgcacctgcatgacctaaatacttgcatactgttgccagagctggcttccttaagaaatgcatgcttccctctaccgtggtagtcactgagagagaagagccatccaagggaatttaattataaaacttttgaaactgcagccctggggctaatcaagcatggaatggtgtctagaacttcacgaacgggttttaaaatttgaaaatcacctgcagtactcatgaagcaaaccactgatgaagaatcttaccaggaagcggtgagatgtgtcctgggaactgctatgtctgctgacaggtcactgcagtgtgttgccctcagctgtcagccagcagcagggctctgttctcagaggtgtcggaagaagcagcttggtaactttttattatttatttatttatttatttatttatttatttatttattgtcatagggacttgctctgtggtgcgggctggcctcaagttcatagttctccttccataacccactaagtactgagatacaggaatgtgacactgcacccggcttctctagggtgctggctcagaagaaaaggaagtgttgacctgggggatgcaggcattctgttttccctgggaagccagagagatcaactatcattggcttgaagcaacgttaaagcaatttcttttcttttacattgagacagaggttttgaccaaggatttaataaataccttagataatgaagtgttgattctaaaaatcaaaaagtgtcagaaaattgcaaagaagagaaaagatcaccccattctatgacccatggataacagtgattctaggcttacttcctgtaattgctcaaggccaatttcatctgttgacagagcgtaacattgtacaacatatgccgttgaatcaccctccttaaccctaactggaactttcttttaatgccttaagttctgtccaccaaaattgtttttattttattttgtgcctgagtacattgcttgcatgtatgtgcaccatgtgcatgcgtggtgcccatggaaaccaggaggggacactggattcccaaagactgtagttacagggtgtaagctgccaagagggtgctggggcttgaacacaggtcctctgtaagagcacccagtgttcttaaccactgagccaccactccatgtactcccgccaaaaattgtttaaattcagatgtgttgtttctttgtactaatggataaacatttgtttgtccagctctgaatttttatacattgatgcctcagttttttggtttctttctttctttctttctttctttctttctttctttctttcttttaattgccaggaatcaaacctacaaccttctacatatgaagcaaacattctatagccgaggtatattttggctaaattttgaaatttttatgctaatttctttggacatatccataattgtgtccttagggttagaatgaaggtgtcaagggttgaagaatctagagcttttcttcctttctttctttctttctttctttctttctttctttctttcttttttttttgtttttttgagacagggtttctctggagcctatcctggcactcgctctggagaccaggctggcctcaaactcacagcgatctgcctgcctctgcctcccgagtgatgggattaaaggcatgcgccaccaacgcccagccagtgtggagttttttagtgtaggtttttgaatagccccatacaaagattgcaccattttacatttcactcatggtactggtatccttgatagcactggcaattaccaacatgactatcaaataattaaaatgtactatcaaccaaatttatgtattatgaaaggaagactagccctcagagataatctgtgactaaagagatagtgttcatgtgtttgttttggtggtattacagttgaacctaagacgtcatatgtagaaggaatgtattttaacactctgctgtatccccagcacatacttttgttatccacttgacttttcttgttttgacttgtagaagtcctatccaggattgaaatcagtcttgtgtgtgcagcaatcacctatgcctgctgatccatctaagcagccccgagcatgattctaacttactgccactttgaaagaattgttactgtttgaggtcattgaaccagacacatacctaaaggagtaattgatcaaacaggtgtctaattacaagtaggaagaatacagtctgtggtacttaaagataggtgtgttctgatgtgtatggtgtcattgggcagtgacaccactgtgtgagcatggagaaatacatgcaaactaaggaggctatactgccacttaggtgcttgtggtgatatattatttatgatttattaaagcttgcctgaggattcagaaagcaaagtcagccataagctatagagatacacaccgttaatcccagcagccagaagctaggaggtgctgctatagacctttaatcttaggactcaggattaagaggtagatggatctctctgggttcaaggccacccaggaacacatgagtttgaatcagtccataagagtaacagatgacatgcctttaatcccagcactgatgggtataaaagatagaagcagggtcttccatattcagtaggagacattcattctccagccatgctgaggagaggcagcaggatcagcccattcagcctgaggtagtggtgagagcccagctactttgtttttctgtccttcatcttgaagtttgaagcccaatatcagtcactgggtcttttatttttcatgttacaggtgctaatcttaggggaccaccatcattgaccaaaaatttgtgctgctgactgttagggagtgttgactaactaagacacttaaatctctgtggtcaacctgaaggagtctcagattttcctttagttctttatcctgtgaaagaggaaatagttggttttttgttgttgtttttgtttttttcctgccagactcccttatgtctttaaaatggcttctaggaaaccttttctagtttttattgtttgttttcttcctcttgtctttgatcatttatgctcttttggggtcaccatgtacccttaaaattttaccacaggaaacaaatcatctcagattgtcccagttttcaaaaagactttaagaaacaactttgaaaccaagagtgatggtgcacatttgtaatttcaacacttgaaagaggcaagaggttcaggagttcaaggtcattcctggctatatccagtttagagatggcctgggctacagactctatctcaattaaaacaaagaaggaacaatagggagggagggctgagaggaaaggaacagaaaaggagtctttgttttaaagctagtaaagcaggagccagttacctgtagacaatagggaggaaacgaccttcgtgaacacctacaaactcacgtgtttgttatagtgagaactgaggctggcacagaaaggaaaactaacagtaaaaatagcagaatagggcactgaggaagatggttaagagagttgcagcaggtaagggatagccaagaggaccagagagagaacaggcttcaagaatcaaggccagttgcagtgggccagtggatagtgtctatgagacctttcccctctgggaaacatatgttaggcactgttgcttattaaatattcttgcttttaatacattgcttctaatgcaattgtattagacctagttgtaagtgaggatggcttctaacaaatctgtcctgtttgaggaaagagacccaagaccatgctatcgacagagacagccaagaatactgcagccatttattccttggtagttatgatatcagagagagctgtattcagttgataacacttgagacgccttcaaagtcagagttagcaacaccagatattaactgatggccaacagtcaatatcatccactaaaaagccaaagtgttcaattaacaatcagcaagacacctgcaatgtcagaaggtagtaatgctggccaagtgactattaactagcagatagttaatctcagagctgtgccagagtccaaaatggattagggtaccggctgcagccacccttagctgggtgagtagcatatgaataacgcatgctcatcaacctggttgggttaggttgatatagagtatgtaggtcctccattggttcagtccatgatagcccagaaaattaaccagtttcaacagagattaatttcctctgcatttgtccagtttctttacctacaaaaaccccagacaaaggaaatccaacagcctgtttttctcttggaaacctgtccctcattctcagtactttgtctcactttctcagttcagttaacttgagttcccacttttctgtaataattttctttagattattcattttatgtgtatgaatattttgcctgtgtgtgcaccccaagtctgcctggtaccagtagaggtcagaagacagcaacagatcttccagaactgaagttacagatagttgtatctgccatgtgggtgctggaaatcaaacccaggtcctttggaagagcagtcagtattcttaatcactgatacatttctccagttcctctggaaataattcttaataaagcctgcattcactttgtatacttcatgagagcccacatcattaatcttcagttgtgagagactgctgtcctaggttgatctttgatgctattgtaggtctttgggtcatgcacaactgggccatgaaaggtcccagggtttaaacaattctgacatcactagctactgtcaaaagctatttaaaattcttgccacagtacttggaatgaagtttcaattcatagtttgagtcactatcagattgacagtcctggtttgttttggagaaagtttaggaaagaagtgaatataattgaacttaacttttaaagtaaagtcaccacatgtttcccaggggtggtaacaggctgaccccatgcttcccagggctggtgactggccccatgtttcccaggactggtgacaggccctctgtctaattgttctgaagagagatgcttctcagaaaaacaagcatccgaaggtttgatgcaggagttagtaccaggacaggcaagcactgtggtttgcttaagtgtttcccaagcatccacatattgaggtttggctgcacaggtatgttggtgggaggcagaagagccattagatggtgggatgcaaattgaaggcctgataccattgggtgcatgtccttaaaggagattgtgaaaccctggtcacagcttcttctctgccatttgtttcctggttgatagagtaatcatttttgttcttaatggtcctaccatgatatgctggtttgccacagacccagagtgcagcagctgtttgatcttagattagaacatctagaaccatgagcccaaacaaaccttttctcttaataaattgattatctcaagtattttattatactaattcaggactgactaatgtagcaggtctagctacaacaacaaataaccatcaaattcccatggcttaaaaaaaaaaaaaaacaccaaaggtttatatattaccttagttggggtttctattgctgcgaagagacaccatgaccatggcaactcttacaaaggaaaaacatttaattgggtagcttacattttcagaggtttagttcattattattgtggtgtgacatggtagtatgcaggcagacatagtgcagaagaagtagctgagagtcctacatcttggctggaaggcaacaggaagtggtctgatgtgctgggtgtgacttgagcatatatgagaccccaaagcccacccccacagtaacacacttcctccaacaagaccatacctattgcaacaaagctaccactcctaatagtgccactctctatagcttatgatagccagttgcattcagactaccacatatgtcaaaacacaagtcctagccggagggatggtttagctctaagcctggtgtcttaagtttgagacataggctgcacatggaagacggagagaactgactctacaagttgtcttctgacctacacagaaataaataaatgtattaaatttatcttaatttttaaaaggcaattggctggagaggtgcctttggttaagagagtatatcagtcttccagatgacccatgttcaattctcagcacccacatcaggtcactcaaaactgcctgtaacttgagctccaaggggtcctatgctcttggcccccacagatacacactcacatacacacaggattaaaaataaaaaatttttttgatgacaggtctagtgaagggtgccagggagtccgctttggccgaccttcattctgatacccagatgacagagcactctgagtcttgctgttttggcaaagggccctgcagagtttccagccatccgtgcccttttgcctggaaagaacacacattcaccactcagtagcctgattaggaacgtggcccaggtcagttatcaaatggcaggaggtgcttgctatctgacctcattgtgcctaaaggaaaagaccagaatcatcctggtcagtagcacaagtgactgccacaatgtgctcttcttgcagatgaaatacatccaaatcttcttcaaaggagactgtcctggtgtcctggctagtaacagcatctggatgatgcctacttagggctctcaattaggtgatataaagtcatttctatcttgggtgtaatccctaatgatttagagcactgattctcaatttttctaatgctttgaccctctaatacatacagtccctcatgttgtgatgacccataaaattattttcattactactttgtaactataatttttgctactgttatgaattgtaatgtacgggtatgtattttcctatggtcttatgcaacccctgtgaaagggccattcagcctccccctgacccaacaggggtcgtgacccacaggtggagaactgctgatttagagacttctgaagaaagacaagctatctgttctccttgctcctcccactgtatactaatgtagcaaaaggaagactggaaaattcagtacacactgctcttgctgttcagaaaggagtggatggagttacacagaaacaatccaaaattcagaagggattctgcagtcctcttggatgctctgccctgaggtggagaatgtccctatggggccttgagggagggctttgcctcagcttttcttctgttctcttctctaccactagtcgttctccctttgaagtcacatctgtcagataacaattaccagagtctgttgttttgaaccaagtgccatcagaggctaacactcacactgaagttacctaccctgacctgaaactaagctattttatcttatcttccaagaaatctgcactagagaaatcctatccagattttccagctaggccatcaggatggtttagggaaagtacctgcttcacaagcctgaagacctgagtttgatccctggatcctgtggtagaagaagagaaccaactcccaaaagttgttccctgacctccacacactctgtgtcacatggcactcacatacatacacacacaacaataagtaataagataataaacagacaagtcgaacggacaagttagcgattcctttctgcctttccacacaaggaacaacctgaagtgaccttgtgttgagctgttagtcattttgttctgtctccctggccctgtcctggtctggaaatgaccagtctactctgtgctgttttgtttctggattctttagactctctctataaatacaactttctttgctctggccactggaatgcttaggtctgtcttccagaatggaaggttgtcgccagttgaaataaagaactgaaaataaagtcaggctgggagtagagtgcttgcttagtaaggcaaagctctggaattgatcccccaacacgttcctcatcccctgctacatggtacaaaacactggaaaacttgccctttggcttcatctgccgctgtctgacttaggaaatcggagagctcccagcagtcttgaacagttttcctggttgtgcgggttcaggctcgcacaaagtggctgtggtgtacaacttttcaaaggaatcagctccatgtctctttgattctagtcgctctctccatccctgcagcaaattcccagtttttttctaactccttcctttcttgtgtttgctgtgtgacaggtgatttttgcttcctccaagcccattttgtatgccattgtgaaccaggatggctttgctaggagatggcattttaggcttttcccttgagctactctttcccctccccccgtggcctcccatcttcccacccctcagctgagtacccagagccgggtggcatgtactctaccactgagttaaattcccaacttccccttgaagtattctgtttgtttgtttgtttgtttgagacaggattcctccttgaaacagtgttagctgtcctggaactcactctgcagaccagtctggcctcgaactcagagccatccacctgcctctgcctccctggaattaaaggtgtgtgccaccactacctggtcccttgagctattcttatccaaaggttgaactaaaacaacaaccccccttaaatgcagaggttcccaacctgtggcagcgggtgggggggtgggggggacagacgacgggactgaatggccttttcaccgggttgcctaaaatcatgggaaaacgcagatatttgcattacaattcataaccatagcaaaattagttaggaagtagcaacaaaaataattttatggttagggtcaccacaacacgaggaactgtagtaaagggttgcagcattaggaaagctgaggaccataaccctaactctgcttgcttgtggacatcttaacttcaggactaacaatgagaatgacagcagttctcctcacttcacaaggaggaggaagtgtggagtgctaattgaccttcttcaggaagaggggttttcagttttggttttcatctggtggttttcccctgctctgcagatctgactattcgtcaccagcaagccaggcatcttttgggcatacttattatgaacagtccaccttcaaaacaccctttcctttcccactaaaactgtttggtacaagttgagcatgcccagaggtgttttaacccttcagacagttactgcctgacctagaggtaaacattgcccaaagtgggtccaccattcttccttcttaaattatcccttaaactgagcatgttcatgaatatgctcacccttaaagtggtttggttagagaggagcatcatctcttgttgattttttttgtaagtgatgttttgtttttgttttgaggctggccgtgagtttcgggtcctctgcctccaccccattagtgttgggattccaggcatgcgtttccttctcacttcttggcatgttggtttcggctttgcattccactgagtttagttattgaccacaccctctttgctttttgttgttaaatcaggcaattattttcagacttcatcctctctcatgagactttcaagtctcaactcatgtttcgggcatattagttatctaacattcaaattgtcccagaatattgtttttaccaaatgtttgccaatctcccagatctgcttctcactctttggggcttgttcgttcacctcaacgtgttattctacttgagttgttagtgacaacaggccaggtcctattgcagcagctcataatacccaactcttcctgggctatttttgttttgttttgttttggttttttttgagacagggtttctctttgtagccactctggctatcctggaactcactcagtagaccaggctggcctcgaagtcacagagatccatttgcatgtgactctccagtgctggattaaaggcctatgccactattgcccagctcaactctccctgctttaaagaacaaaggtttatttatatatgctgccaaagggcagaatcaaagcagttaagattattgattttttttaatttatttatttcatgtcggtgtgtttatgtacttgtcagggtgctcatgtggaggtctgaggtcagttttcttttactgtgtgggttccagggatctaatttaggaatagcatcagacacctttacccatgaagtcctctccccagtcccaaggttactgagcttaactgactttatttttagttttcaaaaatctagcaatttccaatgggccaaccaaaggtgtttggtacaggcagaaaaggccttgaaagcagatccaatgagatgtaaacaaatctgtcattagaaggtcatttcctttatggcagagaaaaggaaacagagtagaaaaataattgatagcatcaagtcatttctctcatttgatgttttgttttcttggagaaaggagctcactcataatcctagctggcctagaactcactgtgtagcctaggctggcctacagcttgtagcaatcctccttcagcatccaaggctaggattatagataggagccgccactcacagctaggttacttctttgtgtgaggactaggcaggaggagctttcggcttgtttggggtggggggcacttcctggtatttttgtaatccagatttttcaggaggtcagaccaataagtttagcttcagatgggtgtgaatgactccatgtagattgttagcctggtattttgaggagtagggcaggtgattagtccaaacggtgacctcctgcaatgtttatttaacacttgtttatggaagcattcctgtgacatttggacatggtctcctattgttgattactctggtttattcatttgcaacgtcctcctcctcctctgggaatttagcccagggccttaacatgccacacaagctacttacctctgagctacatcaaccctttgttttgtttttgttataacatccagtttcggaaggagactaaaggatgaatgctagcattttgtgtctagaatgggcatggcttctggtaggctcagtagttcagctgaacttatccacatatctggacatccatccagatgtgtggagcattggcgactgcacaggacgttcttccttcttccttcccctttctcctttttacatggacagtgtggctggaagggaagcttagggttaggcagatctagatatcaggaagacgagtgcagttatacacattcggggaaaagcaatgcattgtgagcagaagagcacactgtgttcatgatggtagaaaatggaagtcaggcttggtgaccagactcagctgtaatgagtctgaggcaggaggctcagaagtttcagatcaacctaggctataggacaagaggttatctcaaccgcccatcctctaacaataacaaaagaatgtgaaatagctaaataaaaccaagtttttctctccctcctcttctatctcccacttcctattttcctagggatataggacctttcttgttcattctggatccacgctgtgctcctgagctacagccctggtcttcctctcctgagtccttctcccccatctccaggtcctaaaacaatttccattcctgcttaaattaacgcaatccttccaaactttattctcttttaccttagcccaaactgctcataaatattgtactgaattttcgtaacactatactttttcccccctgttgtttgacgttttgccaacaaaagctttgaaatggctcaaagacaagtaagacttccaaataacttgtagagtgcttgggaatctccggctgtgcttttaagagtcagtcattttatgttgcctgtgattagcaagatttaaccaaatagaaggttttgagggagcttttgctcctggccatcggtatccattgcagggtcagtagtgggttacaggtgtagtagtagtgtattctctaggttttgtgtagtttgttgtgtccggacagtgctgatgtcattgctgtttcccactgttgctgagttctttcaactgctgcatgcacgaaacgttgccaggatacagtctcattccctctgtccaggctatcctctgcctgcatggccatgcctcctgccgtctctgtcagcagaacgaaggtctcccgtacctttcttcaggtttgcatccataaacatagggaccgaatgtctctcatccttcttttcttcccctcttttttttcttcttaaaagccaagtgggaaaggctgaggatgtagctcagttggtagaatgtgtgtctagcatgcatgcatgaggtcttaggttcaacgtcaaacacctcataaacttagcatgggggcacattcctgtaaccccaggactcagcaagtggcagctggagcatcagaaagttcaacgttatccaacctgggctacgtaagaccctgtctcaaaacacaaaacaaatacaatgagataagcatctgtacctgtctgtgtgtacactgcccctatcttttgcttttcttgtcagtggaaatttggggaaagtaattccagtgaaatcatgtttacagctgcctagtgtcccacagttttagaagccatactcttcccttcgttgttaaaggacatatattttgttcatagttaatttggtccttctattttttaaaattacttttattatttttaaattaatgtgtgtgcatgtctgtgtgtgcacatgtgtgctcctgtgcctgagaaggccagggtgtcgggtccctcgggagctggaattcctgacaattgtgaaccactgagcattggtgcttaggaactgaagaagagcaatgtttgcaattaacccctcactgagccatctggccatccccacttacactattaacaggcttatatgtactcctggaatacttagagattttgtttttttgaggcagggtctcattctgtgtagctcaggctgtcctggaactcaaaacaggcaaccctatctcaacttcctggattctaggattacaggcatttacagacatgtcccatacatggcctggaagcttttttttaaaaaaatgtacttttagggatgtttgttttcgttttgaagcagagtctctacatagctctagctggcctggaactcactatatacacaaggctggcctcgaactcagaaatgtccacctgtctctgcctcttgagtgctaggattagaggtgtgtgccaccacacctggctacttttagttttaacacatgttgccagaacttctccaaaacggttaacctcgaaatgctgcagaagacacctctttctctcttccttcctatatggtttctacccagaatggcctttctctcactatgtagcccaggacaactctgaaacttctgagcttccttccaaggtctgggattacagacctgtgttactctgctggtttttgtgatgctaggatcaaacctagagctctgtgtatgctagacaagcacattgactgagacacatcccaaggcctgtgcttctagagtattagggaaatgactgtttaccaactgttgagtggatgatttgaatcgtaaacgaaacaacagtgaggtttaggaaagattctgtgtgcagggatattttccctctgcacttacccctcaccctcataaatagaaagccaggtgtttctagcaccagaaaaagacctctaccatatcgcaatatactcatattgacaagagtttatatggataatctgtagggctgaaacaaaagaaaaattgtcaaagaagctttttgttcccagaatcaatctgtcttgtctcccctgccgtgccctgccctctcccctcacctcttctcctctcttgtgagtctgagtctcactctgtagcccagactgaactcaacttccagtccttctgtcttagctcctatgtgctgttgtgtgccaccatgcctggcttaggaactacccatgaatttgactaagatttctataaaataacattggaatagcaccaggcttggcagggcacttgagtcccaaatgcacaactgaggctggcttgggattctgcagaatcctgtgctgtttctcttaattctgagtggctgtgaacagctgtgggtgctgcagggactctgtctctccacacctcattttagatttctgtagttgccctaaaggaaattcactgttgaatgcattgcgtagtcctcattgaatagtcaaacactgtagcctgcagcctcattcgtttctctctgtcccccagcattcccgtggtttggcatggatattggcggaaccctggttaagttggtttactttgagccgaaggatatcacggcagaagaggaacaggaagaagtggagaacctgaagagcatccggaagtatttgacttctaatactgcctatggcaaaactgggatccgagacgtccacctggaactgaaaaacctgaccatgtgtgggcgcaaagggaacctgcacttcatccgcttccccacctgtgccatgcacatgttcatccagatgggcagcgagaagaacttctccagcctccacaccaccctctgtgccacgggaggtggggctttcaagtttgaggaggacttcagaatggtaggttgggattgcccttgttagaataaccaaacctctcacgtgaccgcagtctgggcacgctaaaacctagaccattaacaaaccctgggacttggacttggctgtgctgtggtttcctgcctgataggatggccaatacatgacctatttcatagggctgtcccaagaaaggttaaatgaggaaatatgttcctggctcttaccatgtactcaacatcttttaccatcttcacttctgtggcacaggctggccttgaactcaccatgtagccaaagatagcccaaatttctgatgctctctccaagtcctggggttacagtcatatgctgccatgatggtctatgtgatgctgggattgaactgccgtgtggtgtgtcaagacaaggtgatctgcatcaccttcagaggcccttagctcagttagtactagcttttccacacttactacataattatgaggccagttctgtggatccatacactaagacccacaggaagactttctagacatctaactaaaaatgatttgccattcagaagtttctcttacaaaaaaaaaaaaaaaaaaaaaaaaaaaaaaaaaaaaagaatctttggctggtcatcatagtgcagtcctgtgattctagcacttggaatgtagaaggaccaaggctagccaatctaactcaaacaaacaaacaaacaaacaaacaaacccactccgaaaacatgctcattatcattgataggtgaattcttttgtttatgtgccgtgcctagtctcagatatggagaagtaacattcagcccagattctctctcgtttagcaatcccgtaacatctgtgttctaacttctccatctccccagtcaagatagtaatctctactgactagcttcatctcacggggggagggggggtaaagtgggactaaaatgaatgaacaaatgtagctctgtcttggaaagtcgaggcagttagatatgtgcttgcacgtaggtgaaggaaagttggaagattttagcatcgacatctcacaaagttgaaaatcacaaagttgagaatgtggcttttcaaagcttgtagtgcagacttctgcattttgtcccagaacaaatgtagctgagtcttacagtagaaaaatctgtgactgttgcataatgaatgatcatgttcttcatggtgtttaatgaagctataagatgcaaattctgtcatcaaaaggaacaccatttccttcactgatctcagtgagtaatcgttgggccggtgggggtgggggtgggctgctgatacaatccagggcccaggcttgcagtacaaactgaaccttcagtgagtactctgtagaggagctggcagcagtcctacagcaattacctgtgtgagactgattagctccaggttttagccattttcttccttgtcacccttccttacacagctacagaatttaatacaatcacttacctaaaatgactcatgggtggggttctcttccccactgaagggactcagtaaccaagctgttttgaaataaacagtcatggatatgagaactaaatccataatatgggggcgggggttaaacttgaattctagttctgtttcagcatttacctgctaggtggcttttgctgtgggcctcaatttcatcatcagcgaaacagtggcagcaatgtggggagagggggaagggcatcccgggacaaaagagctggaagtgataatagcatacttgcactgtgtgaagaaaccaaagctttcaggcccttaagaggcttttgtatagtaatgcctgctgggtaatatctggtcttggactccatcttaattcagaaggagagctggctttgtgtgggagtgagataagttccttaaaccttccagtacatgctatcttgtctgcgcactggagaacctgccatgaaccaacatgacctgatggatttatgcaacctctgtcataccttcacccctcctcagggtttactcatgtcctaggagaaagagttactcaatctgtgttggccatgagcaagtgtgtttcttaaggttctgaactgagaaaggtccttttatccttcaggcagtggcttggaacctaacgaatagaccagagcagagagcacctctggagtatttgctaagctgtttggccaagctgtttccaacagtattggaccaatggctgtcttctgtttccatgataagtcttgaccaatgtgaagacagaactgagaaagatttcttcctgtgtcctgtgtgaataaatgatgtgcttgtatccaagcttgtgaggatggacagactctctgccttctttctgtgtagccatttatccactcaacccattgcttatcatgccccttctatgtgctaagtagtagtaggcacaaaacaaatttcctgaccaccttgtggtcattgatcaggtaagcaagtaaatatggaaaatatttaatatatagatgcttaatatatattaaaagtgtgtgtgtgtgtgtgtgtgtgtgtgtgtgtgtgtgtgtgtgtatcatgaaggagaaatagaaggaaagtaaggatagagaatgttgggagggtctctggatttgacaaggttacattgaaacagaaacatagagaagtaataaataccaggctgtgcagatattttaggcaaatagattactaagtgttaagatacagaagtgtccagagtccaagctcctggatgttgtagaacagaaagcctaagacttaggaagtcttatataatctagggcaatatataatctagggcagcaatttcaacctgtaagcggagaccccacaggttcgaatatcatatatctgcatctcagatgtttacattactattcataccattagcaaaattacagttatgaagtagcaatgaaatgttatggttggacccacaacatgaggagttgtattagagggtcatgacattaggaagggtgagaaccacagctctaggggctacatggttagcttatcggttaagcttacttgctactcattcattaggataatgtggatccaagcacccacactaggcagaactcaaccaactgtaactccagatccagaaaaatccaataccctcctctgaccacctgataagcacacatgcacacacaaacacatgaacacacatacatgaacacactaacatacagacacacagagaaataaagtaagaaaataatatgtaatactctctgtattaaacagtttacccaacaacacagcacatgtgtgtaaaatcatgtaattatgtagaatcactgcttttggagtttcagaactccgatatctgggccaagtagaagatcttcagcagattctagttagcacttactaggtgtgaggactgaatcatatatatatatatatatatatatatatatatatatatatattaaatgcctttacattttaaggaaatgttaggtctttctctgatttagaataaccagaaaaggctgtaattgatgcgatggtcattaaatagactcttgtttaggatattttcgattgaacaaggatctatttcaattttatttctgtttcatagagtctcttcttttaatttaaaatttttattacctttatttttattttatgtgtattttttttgcctgcatgtatgtctgtgtgccagtgtctgtggaggccagaagactgggactaaagttacagacagctgtgagccaccatgttggttctgggaatcgaacttgagtcctctggaagagcagccagtgcttttaacccctgaaccattcctccaggccctgtttattatttatttaacatttaagatcatggccctaatgaagcttcatctttgagacaggatcttacattgtagacttaacccctaaacctcctgtctctgcctcccaggtgctgggattacaagcatgcatcactaacccgacttcaagtcaattcatgctggtatatatttgttttctaaagtactgatgtagcaagctggaacacaaaatctagtctaatgttagatggagactggtgagatgtcttaatgggtaaaatgggtaaagatgcttgccaacatgcctggcagcctgaggggatttcctaggaccctgatggcagaaggggagaaccaactcttgtaagttatcctttgatctccacatacactgtggcacacccccataaataaatcaaattaatgttaggtggtgtgtgttactgataagccaatgaagaattccattattcatttaaacatgaacctccatgtgataaatcctggttatccataacaacatgaaaaaatgcagattatagttagttttatagcaggatgttttatctgctaattctaatatttcattctctgtcatgcttcatacttaacttcagcaagaatattactaacgcaacatattcttaacagtagaaaaagtttatagaggaaaaaaagcccacattactttctacaggacaaatatgagttttgttcagcttgagctaacattagtagacattaaaagacattcttttgccgggcagtggtgacccatgacttaaatcccaggacttaggaggcagaggtatatacatcttaggaggccatctacagagccgagttccaggacagccagggcaacacagagaaaccctgttttaggggggaaaagtttatttaaaaagaaaatctatggatctgtgctttgaataggatatgataacagtctttggctgaatgaggtccgagggaaagattccttcatcataggcttttcagcgttaagactttgtccaggtctggggagattcctcaggagggcagagtacttcctgtgcaaatacaagatactgaattcagcccctcagcacctatataagaaaaccaggtgtggctgaacatacctgaaactccagtcctgggtgggatgacttgccagaggaggcaggaggattgatgaggctggctggctctctgcctagccaggaaatggtgggtttcagtttcatcgagggaatatagtggagaatgatggaaggtatcctatgtccttctcaagtctctgtacactcattcacagctacacacccagcatgcacacatctcacacacacacacacacacacacacacacacacactgtaagggaacaaacagtgtgaaaagctaggtggaaatcatgagaaaggggcaaagttgagtaattcggacatgtgacctctctcatccaagtggaccattttaagcagctgtactagcttggttctcactattagtctgggatggttctgtgctattatagtcataagaattttacatataatgacattctccaccctcttcaggcttgacattcaacctctcgtgtgacctctttcactggtaggtaagaaaaagctatccagaaggttccgttagaattggagattcatctgtctcaggtttctgttaggtctctctcgtgaaaagaaaaagaatcctgacaattataatttgtaacccagaataaatgtgcaaattgcttttggcttgatgaccatttctgtcctgacttgattcatggagctagtgttgatagaagcatgctggcagtgaagtattatgtaatttgtgtgtgttctggtggggcccaactgtaatcccagccctagagaggcaaaggcaggaggatttctctgagttcaaggtcagcctggataacataagtagttctaggatagtcagggccacataatggaaccctgtctcaaaacaaaacaaaataaaaaccacccaaaaataaaagaggaaagaaaacaacaaaaacatgaatttgtattttgctcgtttaaaaattatataattttgcttcttttttctgtgctgtagctgaatgatataaactggctggggggcaggttgatagaatcttcccagggagcatgtgtttggtgtcctgtgggggtggtgtccttggaggccagagaaaggtatccagtgctctctatacatcctcttttctcctttgaggcagggtctctccttaacctggagctaacaagccccagtgatcctcctgcctttgcccactcagtctgggggtagcaggtatgcactgacccatccccagtttgttgcatggatgctgagatctgaactctgcagcaactgctcttaaccactaagccacctctccagttccttcactagttatcattgacaaactaacctaaaaccataaggaaatcctcttgcaaaagagcctgcttgtagttagtgtacaatattagcacctatcaaatctttgacctctaaaatgtagtcatcagatgaaaatgatgtttccaaaagtattttaccttgagactagacttgagttgtgtctttgttttttaagaggtgctagagattgaagccagtgatcacttatgctaagcaaatgttctaccactgaactatgtccccagtcaagacaggagttatgttactagtcatgagtaaactttaaagcatttttgtgtagccaaaaaatgtgactcttgaaaacagccctttcagttaggcaatgtgagtactcgtaggatacagtgtgcagttttatcaaatacctaccttgaagtatggtcatgagctcattactctcactggcaggatggcttcttaaacctttccactcatgactccttttttcccaagaaaatatttgtttgtttatgtctgtgaatgttttgtctgtatttatgtctgtgtactgaatacatcgatttttgagggaaaaaaagaactatctaaactataacagctatatgtaaacttgctaataaaggataaaacacaggtgtgttttcctggcttacaatgtgcaaaataaaaaatagctggttagccaccaatgtataagcagggaaagactggtgttccctccactgtgagctgggaacttgcagaatcactcagacctaagtgctgagagttgcaggcagtgaggaactggagcccactttttctggatttaaaaggctcctggacacataatatctcttcctctgtctgcatttagtgaggttaggttgggagcttgcaattggctttggtcagaaggaattataccatgggcattagtaaatgctacagaccaaggcttttgtactacacctcgctaactatgctgtcttcaaactagtggaagcttcatgacatgcttgctggctctggtagttcaagacccatttaagatcagggttagaacatatacagccaattgctgcatgtcagtgtttgttcaatagcatatgtggcagaggtcccaaagatggtattgtctaggaatgttgtactgtcttagtttgtgtaagtatagtctatgctatttgcacagtgatgaacttgcctaacaacacatttctcgggatgtatccttataattaagctatacatgactgcttcattagccaacttttggatatagtaataaactgcctcaggtaatctgactttataaaggtgtagttgggcataatggttcatgccttgaagtccaacacttctgaagtgagacaggaagttcagaaattcaaggccacctagtctagactcactctctttctccatctttgtgttttgagacatggtttctctgtgtggccctgactctcacactggaactcactatgtagaccaggctggcctcaaactcataaatctgcctgcctctgcctcctgagtgctgggatttttaggtgtacacctggctaggctctctcttaatggaagagaaatgggtttattagttttgaacattgaccctttttattttttcattttttatagataggatctgtccttgtagtttaggctggtctcctgtctcagccttcccaagtccaccataccagactttaaaagtccaacagtatgatgacttgggtgtggagtggagtgggctctactagcaagagagatccagaaaactcagtcagcttccagcttccagggaagacatacactctttttagggcagggtatgccattgagggccacttggggaaagttccatcaactcttcaccactctggcaaccatgctccgaattcgtggaaaataaacaacaacaacaactaaaaccattatctaaaccatagcagctatatgtcaacttgctaataaaacacaggtgtgttttcttggcttacagtgtgcaaaatacaaaatagctcgttagctgccaatgtacaaacattgaaagactggtgctccgttgccacatgacaacaccaggctgaaggtgaactgtgagcagacatcttgttgacacagccctcagcattgtgttacctttagccagtcgatggctccttttgttttcttaccctcccctttggcacctttgtcctgaccacttgtgaaggaaactccagccaatggaaagtgttcatccactgtcggaatcagaagcatgggttttaagcttttctcaaagtaaattcaggtgtacagacaaaccatgaagcatggtctgtctcagatttccccgtttggaaatctctgcgtcagtttgacccatttgcccctgggaagctctcctccttagggtctccttcctaaggtctctacaaaagtgacccttttgtttcccttttggggggtatttaatatcttaaggtccaaaaatatccatccatttgaaaaagtctagaggagggatgtgtgcttcctactcatactgtgtgtgggaaaggtgacacaacagtgtttcagatcaaagttgtatgtctttaattcacttatcttgacaggtctctctcctcccacccccatccccgggggtagtttcagggcatccaaatggacagattgcctatgtccatatttatgatgttggctcttggggagcctgtcaatagtgttgatgaacctatgattaatatttaagcagattaacctatgttttcaagattagctgatgaaattgccagttttcagcctggagtgacccatgggctgatagctttccctgttcccttttactatttgttaagcagtgactgagggcagcctttagcatggtaccaaggcacatctgaggtaaaacaagacagactgtgaccagagctgttggtttcagtctctggaaccacagaaggtggaggacataatatggaccccactgtgccccctatagcttttcaggcctcaggactgttctatacccgtagcattgccctcttaaaatgtatatggtgtgaatctcatttaaaactttcactagataaaaatgatgtttttggaaaccttcatgggatgcatttgtttggggtcacttggaatgcttattcccatgtgtcaagaatactggcaccatgctggcgacctagtctaattctgcagtgcaggcatagattccattggtgttaaatagaaaattcagactgagtgacccaagtcaagttttcttgtagctgttaccttaggagtctctgcgtgttcttgtctatgtgagatgtgtgggtgggtgagcccgaagcgtgtgtacacattgcacacactattgctcttcaccttattttctggagccaggcctcttgctgaacctggagcttacagatttagcaaggttatccagccggcaagctccacaggtcctcctgtctctacctcctgaagctaggattataggtttgaagccataatgcctacatctttaacatcatttaacatcattgctggggaacccaaactccagtttttactgcctgaaccatctccctagatctagcattatattacctttagtagaatagcaaggtctgtctagcactcgtgtagattttttttccaggccccataaatagtaatggcaaataagatgaaagtagagaccctgtgaggtgagacgcttgctagctgctagtgtgtcgcttggggaagtttgccctaactgcttcttttagccattgagtaaggctaatggaacctacttgtatatttttggtggtgatggtggttttgggggttttgtttcatttttgtttgtttgtgggttttcttttggaagcagctgaatagccatgaccagtcttgaactaatgatattcctgtgtcaacattggcagtgttggcacttcaggcatgtgccacaaatccagcctcacagggcttttttttttttttttttttttttgcatgtttgtgtgtttgcttgtttgtttgtttctctgtgtatctgtgtgtgtgtgaaaattaaatagtatcttccttcattggttgagtttcatactggtgattgttaagtttggggttttttgtttgtttgttttgcagtactgggggcttcatgaacactgtacaagcactctactgcagagctacagccctaatttgtggggttttttgtttgtttgtccaggaagcttatcaccaacttggacctaaggcagtgaaattaggatagtgatattttgaggatacagagtggccactagctactcaggccacctatcccccttgcccctctgttcctaaaagaggtgaaggggattcgtctgttcatattcgcctccctccccatggtgtctcactccctgcttgcctctggctgacctgcttcccctccaaaatagtcttcctttcatatgacatataattcatcacctccttttatcccaaacagggggaggttttatttcatagaattctgcaaggacactcctgggtcaccccagctagtaagccctttgtgtgtgggcagtgctgtgctgatagtatgtggctgtcatgaaatcttcacagcaacactgggaagctaaataactcaccccgatcatctcagttaagtaggttttagatctagagttcaaagccaggtccatctgctccagagccaagtgtggtaagaggctttgtggcctccagggcattctgctctactcattcccaagccttttggaccccatgttctgccaagaatatgtaggattcttgataacttctcaatattctaattcactagtcacttttggctattgtaacagtttaccccaaatctggtggtttacaactacagacactttttcaatccattctcttgaggccagtggccttccaacaaagcattggcaacaacacaattctgtagaggtcacagggagatgacactgcttgcctttcctggtgcctgcttgctgctggcatcccataggccatggtgcaacactgggttctgtagcttcttcttcagaaggcttaatcctctgggctgttcacatctttgctgtatgtgtcttctgtcattggacttaggatctatccagatgacccacagtgacttcttcaagtttcacatctgcaaagatctgttttgcaaataagaccgagctcacaggttctgggagttaggacaagaagagcctgtattcgggccaccaatcacacaagctaatgggttgcattcccaagaaccaggcaagtgcttgtccttgttctcctggtggtgactgacttttggtcagcacagtttcacagcttaggagtctgagagtatttcttggctctgaagacgaatcttacagatagcacacaccttctaggctcctcccctcacggtgcatggcatctaacaggttctgttctcttgcagatagcagacctacagctgcataaactggacgaactggactgcttgatacagggcctgctttacgttgactcagttggcttcaacggcaagccagaatgttactattttgaaaaccccacaaatcctgaattgtgtcaaaagaagccatactgccttgataacccataccctatgctgctggttaacatgggctcaggtgtcagcattctagcagtgtactccaaggacaactacaaaagagttactgggaccaggtaaaacatgctctcgactaggagagcctctttatgcttcaactatgcctatttcttgatgagcagtatacagtaaggattattgacattgagtatgttttttaaagaaacgtgttgggcttctagactaacaaaaaggggttttattgggtatttgttttattttgttttaggacataggatcttcacttgtagttaaggctatcctgaagctttagtgtattaagcccaggctagcctcagactggaaatcccacctctgtctcttgagtaccgggactttaggcatgagcaccatgaccagtttattggatgggggagcagaatggcatgcattagttcgccagcaggtaggtgtactgagtgcaataggaccaccaggactccaccccaacagaagacaggttgagacaggggtgacaactaagataatcagaaatgcttcagagaaacttcctctgtggatcttcttggtgttgagataggaaaggtggcttgaaatagtatagcatcccaaccagcaaagagacacacaggaatgccttttcctcttttcttgtaatcgaggagtgagtagtcggcacaacgcatggaattttggagtgcacggcacaagaacacagctctgagaccccaggtggtcagaatactttgaggatcccccccccataatacagtctaagactcatgacaggcaagccagctcagcttccagttaatggggaactcaacatggtgaaaggctctgttgtcaagcaacattaagaaagcccactatgagcaaaattaagctgatttggaatgaagcattcctctgacttgctagaccacaaacccattattattattattattattattattattattattattattattgttttagagaaactaaaaaggactagtgccacatagagtgtgcttaggatatggtgttgaaactgttgtttatggcagatgaacatggcatgttacttgtctgggcctcagggtcctcatttctgccatgaagggtgtattgctcgtgtgtgtgtgtgtgtgtgtgtgtgtgtgtgtgtgtgtgtgagtgtgtgtgtgtgcgcgtgcacgcgcacgtgcacgtgccatttccagatttgaactctctgcagcactcttcaccatgggaggaagggtctgccttttgagtatgttttcatgaattgtggtggagctgtatgaataagtgttcctgggagaaggtgatgttacccaaagtctgaagagattcctaggttttacagttggaggtgagacactgcaagcattgtcataggttgaagtcaggaatactgatacagttctgtaatgcacagggcagcttctccaacagcaaaagatatatggagtcccaaatatcaataatgctacagttgagaaaccctagtgtatacacacactaatggaagtttgcatgggttcagaatatagtatctatgatgtttgaaaactgctagcaggcacacaccttttctgttttttaaattttcattttatttattattagacattatcgttatgtagctctggctggcctggaattcatcgtgtaaaccagggtgacctcaaactcatagagatctacctgtctcttcttcctgagtgctaggattaaagatgtgcactgtaattcctggcactgcatacatctgaattttcattgagaatacagtagcttacttgcttggccaggaatgaacactgatcccatggtctccttaggaccaacaggagtgtcaatatatgaatgctcagctaagcaggtcttcccttagagagtgctctcctggcggaggtgtaagctttacaacaactccagacttctcccaggagtaattgaattggtaaagctgctcccaagataatgaggagctacacattctccacagttagaaagcttttgttgatgcagaaacaatagctaatgaatgaccacagctgcatcctcagatgtgtggactccaggggtctggatcatcaggagaagctgtaaagaaggtaattgtgggtgtggcttcttcgcaggtggagtaaggcctacaaaccccaggagtagaggaatgccctttatgatcctcctgcctcagtctcccaagaggtgacattgccggtgtgtgtcaccccttccagctctgaagtctctcttgttttatgttagaaaacatcaaatgtaaacacttaggaccatggtgaggattagtatgtgggacacactttggggaaccattggtattaggaaagctctctaccactgagctacctcagtggggaccattgatgtaagcttctcttagaaactaagagttgcaactccaggttttcattttgtttgtttgtttttccccctgtaaacatcttgttcttgctatggtggatttcattttgattttgtcttttgaggcagtgtctcactatgcagccagaactggccttgaattttccacaaaacacaccaaccatagacttccaagtactgggatcacaggcagaaatgcctttgtgtgtgtgtgtgtgtgtgtgtgtgtgtgtgtgtgtgtgcttgtacaaaaacatgatgtgtgtatgtgtgtgtgttcacatgtgtgtgctggtacaaacacatgacaaggtttctcaatgaacctggaagctcaccaattctagtaggccagatgtgctggccggtgagcattggggatcctcttggatccaccctccatgctcacaccccaagctgggggagccacctccccagatctaccagtgtttgtaagaaggcatgtcatttcgtgatacttgttttcttctacatgatttaaatggttggttttgtatatgttcactgctttctagattgagcacaatcattttccccctagtgacacaagtccaaatctcagtatgaaaattggtactttacaggtattgttacagcatgtagcctgttagaagacaatagtctagagctgacgtggaaggaacagtgcatctctcttggtcattcaggggtccacacacatacccattaatggccattgctacacaggcactgccaattcagttactaaaatgagtcaccgaggatttcttctcactctgacaaatactaatatccagtgccccttcctatcgtatattttgtctctgataaactaagggtttttctgcatgcttatcaaaataggcagatgtttctgcttgtgaacaagaaaattccttgactcaacagggttgaggggaatgacaagtactagagtctctagctagctgtgcaggttcatgcctgctttcccatctagctttttatgtggaatcaccccccattttttagtcgtcccccccatttccagttgtgctagcacatcagtggatgagttaaccttctttctgagtcagccagtttctcaagttgactacatctggagttggtggttgaattccttgatggaacaaggtggaggcctaatgttcaaaagattaccagggacataaactgccaaagttggaaatattagcaaacaagaaaatgtaggcagtacacaacccagcaagtgttttccttaaactcgttcatgtggggtttggtgtgcacatgaaggtagactttctttttgtgtatgtgcctacttgttcccttgtaatgccacacccatgacttaggtagcacagcgagacctaaatggccccttgaaaaggaactcttgagttgaaggtttttttgttttttagaatcactctctgagactatgacacaattgtattataagggcaacattaaaactggtatcttctggtaacagttattgacaatcagtataatttaccaaacattttcttcttgaatctcaacttagtgtcctcatgtcatgttgtcctcatgtcccccgtctcccctctcctaaaattagaagctggtgattcgatgcaaattgttttcccagaattagtggctctttgaagctgcagaactgactgatgtgaacagccagctcttccctgtttgtcattcacggtaaatcagagagaagcctttgccagcacctgagaactaaagttccctttcttgccacgactttccctgaattgggttttcatgacaccaggtagctttgatattgatgtataattaattttattctcagctactataattagttttttaagtttggcaacaaggtctattttggagccataacctccaaaacaatgggaagcttttaaaacatacttcaagcattgggaccattctgtgacctttttcactcttactagtgggtggtaactagaaagaagcaatacccttttccgaagagtagtagaaagcattcttttattatatagataatagttttactctcaaaatttctgaggtaggaagggatgattactctagagaagcagggtcagctaaggcagccttcagggctggtttctgggacagtcctgagtcaggtttgtcatcctgggattggctttgtggttgtgacctgtgtacacaccatttctttccctgtgtatttgcatttagttgcatagggtgttccaacatcagccatttctctggtcgcatgctgcttttagactacccaaacagaacaaaccatgatttggcccctttcataggtgagcagactaatcaagcacttaggctagtagcaagctgaaggtctcacaacagaaatcagtgagagtcaattttattctcaaatttaagggcacattttccttgatgtttggtcttagctgctgcccacttttcttatccagtcttccctcaagttctaggcctagcacttccattcagatgcccctctgctcttcaacaaagtgctccttcgctttcccgaatctttctgaacccgtatgagtagtcttgatgtagctggggacttggatgggcatatctcgaagcaaaaattaaaaagaacaaccttattgtccttcagtcttggaggcgggacattcctaggcctgtgttgcttgctgactggttgtgagacctttgaagaagctctggagatggcagctaaaggcgacagcaccaatgttgataagctggtgaaggacatttacggaggagactatgaacgatttggccttcaaggatctgctgtagcatcaaggtagagactaagcggctaggagctatagagaatccacacaaggcaggctctccaccctggccattcatctagttttcttttttaaagtaaatgccagcctaccagcctggtgcaaatatctgtcatgtcagacctcaaacttgatctcctgtccttgacaaagcactgagatgcttaccacttgacacttgtgcttaaaataaggcaactttgaaagaaggttctggaaaactaccagtttcccctgttccattcttgtccagatgtctagaagcattacaattttcttccccgttaatagtcctactactttgtcccttgttaagaagggggcagccagtcattcatagcataatactgtctgctcataaaccatgatagcgaagtcagggcattggagtttgaacaggattgttcatagtgcttcccagagtaccttggtggaagcttgggtcctgcctggggatgactttgaatactctcactgatatttccaacatagctttggcaacatgatgagtaaagaaaagagagaggccatcagcaaagaagacctcgcccgtgccacattggtcaccatcaccaacaacattggctccattgctcggatgtgtgcgctgaatgaggtaaggctttaacgctgagaatgcctgggcgggggggggggggggggcatccccatgcatcatctttggcagtgtaaaaactgttgtcattcttaggaagcttgccctttattgtgtggttacaccttagagaacaggagaagggtagggtgagtgggggagaagataatatgatttacttttaagtagatacacctgtggaagtgtgtcagaattccagtccacattccattctttctaaccgttatttctggcatgtgccactgaaatgtgaggaaagccctgtgcgtactcgcgtgtgcgcgcacgtgcgcacgcctgtgtgtgtgtgtgtgtgtgtgcgcgcgtgtgtgtgtgtgtgtgtgtgtctgtgtgtgtgtatgtgtgtgtatgtgtgtgtgtgtgtgtgcgcgtgtgtgtgtgtgtgtctgtgtgtgtgtgtctgtgtgtgtgtctgtgtgtgtgtgtgtgtgtgtgtgtgtgtgtgtgtgtgtgtgtgtctgtgtgtgtgtgtgtgtgtctgtgtgtgtgtgtgtgtgtgtgtgtgtgtgtgtgtgtgtgtgtgtctgtgtgtgtgtgtgtgtgtgtgtgtgtgtctgtgtgtgtgtgtctgtgtgtgtgtgtctgtgtgtgtgtgtgtctgtgtgtgtgtctgtgtgtgtgtgtgtgtgtgtgtgtgtgtgtgtgtgtgtgtctgtgtgtgtgtgtgtctgtgtgtgtgtgtgtctgtgtgtgtgtgtctgtgtgtgtgtgtctgtgtgtgtgtgtgtgtgtgtctgtgtgtgtgtgtgtctgtgtgtgtgtgtctgtgtgtgtgtgtgtgtgtctgtgtgtgtgtctgtgtgtgtgtgtctatgtgtgtgtgtgtgtctgtgtgtgtgtgtgtgtgtgtgtctgtgtgtgtgtgtgtgtgtataattacacacaaaatgctcccacctgcaggactcgatattctctctgctttcagcttctttacagtgttgccttgtggcatggaattcaagcagcattgtacagggctatcaaagcactgagagcttgctacagcccaggccagccagagccccagggacaagaagcagttagagctgggaccagacagagctttatgaacaagttttgaaagattaaattcttctgaggaaaaaaaaaagtggaatcccttcctaagaaataagatttgaggagtagaacaaccctctccttgtggtgtattaggaggacaagaaaaagaagttaggtcatggaacaggtaataggagaaatatatgaaagaaagccacagcaggtacataaaataaataaatattttttttttaaaggaagatgggatggagctagagatggctcagcagctaagagcactagctgctctcccagagattctgagttcaattctcagctaccacatggtggctcacagccatctatagtaggatctttataccctcttgcagcataaagttgtacatgcagatagaatgctcatacataaaatacataaatcttaaaaattcatagtaagtcagtaacagggttttgaaatatgtaatttttaatagaaatatgacatgcatgcaaaagatagttcaaaccattaagtgtcatagctacacacacacacacacacacacacacagacacacacacacaccctagatcaataagtgaaacttcacagacttcaagacgttttgaagctagcgatggctcagtggttaagagcacatgctgctattgcagaggacaaggtgagcttccagcacccaagcctggtgtcactactgccctgaactggagctccaggggggttgtagagtccctgccaagctgagttacaaggcccatttgtctgtttgtttgtttgtcttaatgctgatcctggctttgagcttcgtggtttcaaaaagagacccctccatccacaacactgagcagagtgtatcactgtcacctggagggcagtcagcaagtactggcagtccctagtccacatggattttaatgggacactggtaatcaggctccagagacatgcctttgcaaagtccactttggtcaagagattcattggaaacacgggtttattttttttggctttaacctttacagggtgtttttccaagtaaccagacaagctgtaagactaatatgtgggtaggctggctgtattcatgactctcaaaggtcaattgcatagtgacacaccctttgccccacagagcaactgtgtcctttcccctgctttcctgagttaccttctgctggagcgagccaggtcttttcccagataccataatccctttgggagaggccaaatgtacacgttatttgctggcttggatgtttcctgtgctggtcaatagatgaagggactgactcactgactgcctgggaccaaggctcctttagaggctgctgagttaatgtaggctgtctggacagctccgggattggcagtgtcagatttccctgggagagcagaagccaaggtcatcagcccttccgttgttctctgtggttgctgatttgagaatcttcaattttagccatttcctataatggggagctacatttcctgaatctgagttgctttttgttatgataatgaaatgccctcccctcttttaaaattgattttattattttgaattatgtatacgtgtgcacatcagtggtatgaccccggagtctagaggaggtggaccccctggggctggagttaccggtggttgtgagctgtctgatgtgggtgctgggaatcaaactcgagtcttctggaagagcatcatttactgagccatcactccagcccttccaccaaccttcagctttatttatccttttgttagcctgtatcagttcctaatgtgttttattatgaaatctccatacatgtacacagtatgtttggatcatatttgcctctcttactctttcttgtatgctcgcccactggcactgattccccttcccttcccaaaggcccctagcctccctttctactccccccaccaccaatggtttttattagggttttgtttttttttttaagaggagcattggtaaaggtttatttacaacaataaagacaatattgatccatggactgtataaatggactgtataatgacctttgcgccattcccacccctatgacagggtgacaggcccagtctttgctgataatcacggcttcatgaatgaaatagtacaacagcctcgtcatgcctggaagtcagtagtgtgcattcccccttccttggggcttacattctttctagtccttctcccgctctattgcctgagccttagagggagagctataactgcctcacttacagctggacagaatcaatcggcagtcattgattctccgcacattgaccggttatgagtggatgcaaaaagcagctcctctgagtaaagctgatgtcaacactaatccatgggcacaaacagctatttagaaggtaatttgataggcacaccatgtccttttagcaaaaacaatggcttcccaataggaggagcctattgacctccccaggcacaggttttgacctggtgtatagtaccagagatgaatttcctcctgtgtagtgtgcacctcagttccaatctgaaagcagtaggttactgtagcatgataaatgaaaagacccagagacagatattggggttcaagtttcaagctgaagatctgagagtagcaaagcagccagccactagctcttacctctacctcaggctgaaagggctgatcctgtctccatgagctctcaccaagcctcagactgtaacctctcctcagcatggctggagaatcaatctccacatgagaccctttgctttttataactccctaatgctgggattaaaggcgtgtgatcctaagggctgagatcatctttgtgtgagctgttttgctttaggactggatcagtttttcttaactcagtgtcatcttgaactaacagagatctgtctacctctacctcccaagtggtgggattaaaggtgtgtggctggctttgcaaactgatctccagtggctttaataactcataagcaatatatcactataggtaacccccataattgacttagcactgttgtacctgtgggcatatcttgcttggacagtcgatattattacaaacacaaggtccgccaccgctggctaaagccattgatgtcatttgtctcccagcagtctgcattgcaccttttatttaattttgaatagataatgcagagtcccaaagactgcagaaaggcagtcagggaggcaaattcatttctacactcacctcagcttgaacctcactaggaaaggtcccttgttttcacatttggtttgtctttaggctgttttatatgatatgggataaatatgtacttccaaagatagcaagctctacagaacattctcttttaaaaaaaaaacttatttgaatgtgtatgagtgccttgcctgcttgtatttctgtgcaccacatgtgtgtagtgcccactgaggcttgaagaggctgtgggatgccctggaaatggagtcccagacagttgtgaactgacatgttgggtcctcgggattgaactcaactcttctggaatagcagctgagaaataaccacaaattgtacagtctctacatactatacaccctctatgcactattgtgcatcctgctttgttgggttgggttttcattgtggaagtttctaggcatatatgaaggatagagaataaagggctccgatgtatccatcagttcacactgagcagtttccaagactgctgccacacaggcctcggctgtctcttttctcgtttaactccaccaacgctgtcagtcggcacttgcttccaatgtgctcctctgaaaatgctgcctctcactgttttacatagtgcatcttaagattgcgatatttatatttcagcacttgtagtagctttctagcactctacatgctgttaaagatttggtcactttcctgatgatagaatgtttttagctttttgctttatcaaaaacccggcagtgtatacatatatgtgctttctatgtatgtattttgcatagatttgtaaaacatgtgtataaatgtcagtatatctgtaagataaatttttagggggacgtagggacccacaccttgaatgccagaattcaagaggcaaaacaggcagtttgaggccagcctagtctacatagtggcttccaggccagctagatctaacatagtaagaccttgttttaaacaaagtaaaataataatttaaaagataaatttctgaatcaaaaggtatgttgattataattttgacagacattataaaactcgttctataaatgtagttctaatttatatttccactaagcataacatataaatttttaggaaggctgtcaactgaaggcagggtttaaatgagtccaccagacctaagataagtgataattaggtatttattagggaagcgcttacacaggtaagactaaataactgcttcagtcttcctgctccagaagatgccatctctgcccttctgatgctctcactgcaacccaagagagcttgagtcagccctcctctacttataaggggtcatgtctgaacctgaagccatgcccaaagggtgtggccaccaccacaagttcactggcaaagcaagatgccaccacagttaacccttttttatactttttaatttaatagaaaatattgtgccttaatataagtggttatatattttcatatatttaatcattattagtattcctcccttttaaagtttcttaaattacatgtatttgtgtgtgtgtgtgtgtgtgtgtgtgtgtgtgtgtgtgtgtagggatgcaaacctactatggcccatgtcagagtacagcttgtgggagtcagttttttccttgtgctatgctggtttcagacattaaactcaggttaccaggcttaacagcaagcacagttacccactgagccatcttgctgacccagtaattccccttttgtgcacatgtgaactgtctattaatatactatgtacccattgtgtattgcattgttagtcctgctttcttgttggtttgcaggaactctttgttaattaacaaataatttcatttgatatgtactgagataagtttttcttttttctttttttaattttttgagaccgggtttctctgtgtaacagccctaactgtcctggaactcgctctgtagactagcctcgaactcacagagatctgcctgcctctgtcctcctgagtgctgggattaaagttgtgcaccactcccactctgcttgaagataatttttcaagtaaacaaatcaatttttctggattcctacgcctctcctacttcaaccttagattttattattctcagttatgtgtgtgtttgtatgtgtctatgtagacaggtgaacgagttgttcacatatgtgtgtgtttgtatctgtccgtgtagacatgtgaacacaagtgcaggtggttgcagagatagaagtgttggatgctctgaagttgtaggcagttaggaaccgccccatgtgtgtgctgggaaccaaactctggtcctttgcaagagcagcatatgcccttagctgctgagccatctctccagccttatgctgctcttaagaagagttcactaatattttccttagtcatctctcattttccttctttgttaaacatttgtaattttgacccacctgtcctttaagtgaaatatgaaatgcttgtcagaatttaatgctgactctactccatctgtcttcctagtaggatgatacaagaattctactttgttccccctaagtttagttaaattcctcttggatatgctctttcttcaccttgtgcattctgtagtctggtcagtttgggactccagactttatttctaatggaaatttactgaaagaacctctgagtccatcacccacggaatatttttcagtgactaatgtcttcatgaacgtacattgttaaaacttgagacatttcaaagatgatgttcctagaccttgattactcctggtagacagagcagaaaataactgtccaaggctctcttgcctttgatctcagtgaccatggcaactggccgtggtccagcatcttcgtggcaggccagctgagctcaaccttgagcttcagaaataccttacggaagacagaaagagtgcaggagctagagtttggggaaacctgaagcctgtttgcatgcacagactgagaggcgtgttcataaatatgggttcgtagtgaaaaatctacctccacactgcttttttgttaccatatttcaacccttctgtggctcaagtaagatactctactcttcagggcagagatggagattgtttattatatcccaaactcagtagatgaacaaaacacaccacagccattcatttcatttataagttggttgtaatagtattttatacttggagttggggcaggtgagctgagggacaaattgagctctacttcaactctattttcaataacacatatatgttattcaataaaacacacacacacacacacacacacacacacacacacacacatatatatatatatatatatatatatatatgttttctatatatagtaaactgaagatatatcagacctaaagcaacctagcatagtaactgtaacataatgacctgttaattgtcatttctactttgcccatgtcctagtttgctttctgttgctatgataaagatcacggggtgggaaggatttacttggctttcatttcctaatcaaaccccatcactgaaggaagcccaggcaggaacacaagcagagcaggaacctgggggtggggcctgaagcagagacaacagctgctgactgacactgacgtgccctgccttatacaaggcgtgacaccacccacccaaggggagctgggccattccacatcagtcatgaaaatccccagagacttgcttacagtaggccaatctgaaggagagatctcagttgaggttcctcttcccaactgagtctagtttgtggccggttaacaaagaagcctacatagcccaaccaaaatctgacaccctgttatgtggaatgaatgctctggtggtttaactttggttttggagatgctgaaatagtcccatttgcaaacattgactgagcggggtcataaataaccacacagagaacatggagtccttactaaacgctgttttaagccatggtttaattgttttcctgtttgttcattcatttgttttttcagaatattgaccgagttgtattcgttgggaactttctcagaatcaacatggtctcaatgaagttgctcgcatatgccatggacttttggtctaaaggacagctgaaagcactgtttttggaacatgaggtaggtcagggtcacagagacttaattgccctatgtgtattttgggttgtctgtcatatgagtcaggtctgtgtatctcaaaattgatcaagtagaaaattgccttttaaactttgcttttattaccgccccccccaaaaccatttatacaatggaagctttcatagccaacagtggagattcgaagatggttactaaaatgaaaacaaaaagtcatttggaaatgtgaattattattattataactattgtgggaaacagtgtagaacattctttggggaattaaaagtagaattaaatgatccagcagccacacttctgtgtagttatccaacacatgcgaagtcagtatgttgaagaggtaaccccatgatgaaatgacttaacacatgtaaagcactcagaatcatttcttgcatgtgtaaggcctcagcagctgccataaaggtcccgacatatccatgccatctctaaggtaactgctgagctaagcagactaagagctgtgtttctagccctttagagactaggtagctagtgggctcagtatttgtatgtccatagttccctccccaccccttcctacactgaagtcctaaccccaagatgatggcattagaaaatgaggtcttggggaggtgactagatcaccagagatgatctcttctggaaaggaattagcatctttataaaagaggtccctctgcaatgccagtttccagtgacacaggagtctgcaaggagcctggctttgacagagactttcattttggactgcccccacctccagaaagctatgatatggagttatattcttcataagccacccagtcttcagtattttgttgcatttactaatccagtgactaagacactatttcctaaaacagctgagttttagaaacctatattgtcatagacatatgagcttctattttacaaggtggcagtgacatcatatgccagatacagccctaaggattttcctgtgttaatatagataaatatgcattcagatacattatggttatttcatcactcaatctttttgcaaagagatcagcgtttgtttcgtgctgcaggaggtctactgcatagcctcaattatgctaaacacgggtcctgcctctaacctatatccctagccatgagttctgtttttagtagtatatatctgtgaagttaagggcaacattcctagaattaatgacagtaacagttctttggccaagactcagaaacagtcctacagaagtcctccattgttttgtagggttattttggagctgttggggccctgttggaactgttcaaaatgactgatgcgcagtagatgaaacagcctcctttgagaacggagaactgacagacactgccagagaaggtgacgtctccttgggacagaagccaagccactgtggtggatgaacctgctgtatttgtaaataactaaaatcctagtcttttgctcttaggtttcaagcttatgatacaaaatggggaatataataatttttttctgtatactgtattttttaaaaaagaaattgtgcagcctggccaaacctaccaatttcatgcattaactttgaaaagtagtgtgatgtttaagagaggcctgaaaggaaaacgctgttcatttttcttctggggtttactgatcagtgtggtaattttaacttcatttagtaattactctaggagattttacctttacttatattttttcatgacgtttcatgatttgctcttggtttcaaatgaaactacgaatctggcatgttgcactgtgaacactttgtttgtttgtttgtttgtttgtttattctctatttttttaatcctttctgtttcaatgtcttaggacaaaaaaaaaagtccttctcctgtttttgtcccctgtgatcttcctcttaactatctatacactttatttgttgtaattgctcatgtcaatcaaggtgctgaccaactcaacacaaagttaaacacataatctaaagttctaaaaatgtgactgcagtgaaaaaaaacttaaaaggaaagggttaatgaaagtggcacacattggacattgtatgcaaattttatctttgtctttgtacccctcaaagctataatgtttcattggatttactttacactaagttaaaatagtctgtcataaaatgtcctcattcctgtatgccatatgaatggcagcaaatccctgtgtaaagtttggaggggctgtcttagctgatctggtcaccctcaatttaggggaagtcatgagttgaggtgtcagttagaaataatgactgttttatacatgtttatacctaggaaccgtgtaacaagacatgagtgataatgctaaaaggttttttttttttaatttctgttttagtatttaaactgagatttctactttatttcatttctaaaactgaaatataatttatgagagatatatatatacctttccttctgaaaggtttttgttaagatagatgggtcactttcaaaagaggatgctatacgcacactttaacacaagatctaaccatcttttggatggagggtacccttgcaaaggctttggaaaggcaatacagtaactccttggtcaatcttcacctctctaccttgtggagcaccacctttcatttccatatccttgagtcttgaagaagttgatgctaatggaagaattcatgtgtctggtttaaataaagcccgtttctgttgggatgtttttagtgtatatgttattttcatttcttatacctcgtctttatactttatatgtaaagtaactgtgttgctgctgctgctgttttctttctgctgcatagctcatcacaagaggctttcccacaaatgtggcaaggtccaaactgagtcttgagctatagctgtaagtccgtgtagggattttttaaaatttacctttattgctcttatattattgactgctgaatgccaaagtaccactgtgagatttggtgattctgaaccagtttcaagtttctctcatcacatatgcagtttgtcaacttctgcttagctttacatcattcagtcaactatgatgttctcgaaagagacattatctctgtattatctatcctagtgccttttgatggatggtctctcctcccttctttaatctttcaggggccagcagacctcagacctgaaggtcatgcatggttctgcaaagaaaaccagggcaagtaactaactgtgcctatatattttattaattatctgaaatcacttgatgtcttattccaaacatccaaaatattggagctgggtgtagtggtgcacgtttgtaatcccaacacacaggatgctaaggcaaaaggaccagtgtcaattcaaggccagcctggactacctagagttccagtatggtctgcataaccccaccaccaccattggtataaatgaataaataaattttccattaaattaccaaccaagtaatttggctacatagagctagcctgtttctacaaggaaggaattgtgtcctgagggtttttcacattttccttgaattacagaactgtccatagattcgccatcacaaagaaacctggaaagaatcaaaaagaaaaagaaaaaaaaaacttgccatgtgacatgaggttggtgagatggtccagagtgtggcttggtacagtgagataactttgatttggatacagcttagccagttactaactgtgaaagcaagtggctaaaatcctctttgagcccaagtttgctcatctttaaaatacagcaaatagttttacattcatattttaatgcacacattaaagtgtgtcatccatttttgagatgttttaaatcagtgcattaataggtcattcccaactttctaagttgtgatcaatggagacacttagcatggagacacttcacagaattctaacagaacatggccgtgattccaaaaccccatgctcttcaagtttgccatcacagtcgacttgacagtctgagctgacttgggcattgtttatcatgataatggggcttcttagatactctgtagcagaactgttagtttgtatgatttcagggcacttcttaagagcagttcagtgaaaatgactctggattttaaagtatgtatatatagtcttaagcatcactgtaaacatagttgtattctttggcttttgcaatacatggatttagaatccctttcttgggaactgttagtggggaattactattgatgccagtcagttgtgtaaggagtaagtatcacagagttactacaggttactttaaagatctaggaaggaggtggaaactaagatgaacagttgtacattcctgctgtccagcagagaaaacagcaacatcacaaggcaaagtgtgtgatgaacaaaatgaagtcccatgcccacaaaccttacattctagaaggaaacagaacagatacattaggtaatacatagtaaatatacaacaccatattacttcactactgcaaagaaaaagtatgctaaggcttatattccttctgttgagaagaacagttccttttaggaaaatgagaaggggaggagtctctttggtcagggtgaccagagataatctctcattggagatgactctggacagagacttgagtgaaattgaaagcatactaaataactgggtggggaacgggggtggtggtggtggtggaatagggtgttattttccactcaaggtaaatgggagtgggagtttaggggatccataaggggtaaaacatgccaagaggggtgggaatctcagttgtaggatcagcactagaccatgtcctactgggagcaggacttgtaagaaagcagagggctacactggaaggagccatggggctggaggtttctccttggtaagggtgcttgggaaggttttgtagaattttaaccaagtgtggatcaggaggggagggcttctcagctgaaggaagctaagtgattcgggaagaaacagcctgcttgcttcttcggtgtctctttgctggaacctagttgacaaatgagaatctggttcctaggagagaggcagttagctacatatggaggagcttttctttcatggtaaagattttagattcctctgtcatcagcttggagccattgcagcatttcaaataaaatgaagctagaagtaacctggcttcaaaggaacagagtaaattgtcctcttgagggaaatcaataaaccagatactacacaaatatataagaccattccattatctgactcattgttcatagtgtgccaggctcaagcaattcctgcacagagaaccatgctttctgtgtagttaccaagggccacaactctacaatgaatctagttggtgaataaaaaggtcctagcaccaaggttcatcctaagctcttatcccttgcaagagttgttatatggaaattaattttctctcagtgatcagaagatgattctaaatttctgagaaggatttgtttagtgtagcttgtttaccggacctattaacgtgcacattcattcactctccatcattttaatttttactgaaaactcatgacacaggaggcactgggaaaacatgcaagatgcctggagctatcaacaagactggagactccagttttttggggctttcattctgggcaggtaataggcattgtgtgtgtaagccaatacatagcaagtgttcagagcataaatacactgaagaaagggagaaagtgaaatgatggaccaggagaaggacctccttggccagatgttctccatgtgcaggtgtgattcagtcatggtcccagctcttgggaacgacacgctcaccttgctttcctttttaaaaactaatcatttcaggattcagctttctttggattgttcacttgaatcatcactgtcgatactttaccatcgggatcacttcattgtttccactgtgtaacttcagccctttgtgaatttatatgtgatatgttaatcttttcttcctcagccaatccacaagcacttttctctcataatgaactcaattactgcggtttctggaaggtatctgtctaccagtgacacagtgtaaccattcatgtagagtcctttcaagtcaaccttggaaggcgcttgtcaaggattcatcaattgcaatagaaaaataaactttgcgttttaaacatctttggctcattctttactcaccattcacagattgacagggaatcttcccatctagaagtagctgggatgactcaggattttcaccacgctgttttcaaccagttgtcaagaagtcatcttttaaagtattttcatgaaaaataaagtgtcatatatgcatgtagtttaatgtcaaatagatgcacaagactaaatatgaaaaatggtaggagccaggttatccttctgttttttttttttgttgttgttgtttatttaatcactttgagcatactggcttaccaggaaaaggtaaagggggagtggtaattttttttttgactacttcagtgtctaagagtacagggtgtggggtgtgtgtgtgtgtgtgtgtgtgtgtgtgtgtgtgtgtgtgtgtgtgattacagtggtccgagtatccaacaatagctattgcttgaccaaagaccaagaatctgtagttgttcagacggtgagattggatgtttagcactcccaatttggtgttggagtcccagggcatttctagagtctttattctgtgttggaacctgaagcagtggcttctaataccagcgaagaaatgcctcagcagcagggtagacaggcttatcattgagtatgagcacaagcaggcaaaaggcaaaagcttccttcttttctgtcctgtgtaggctgtcaccagaaggtgtgagtctttccacttcagatgatccaattgagaaaatcccttgtaggcatgcccagttgcttggattttagttgattccagatgtagcagttgataaccaagattagctattgtgcccagagagttgtgttacttagctgaagcccagatgaggtaaggcttcaggtctctctataatctggtttctttcatgtgttaatcttgacattcaagtctctagttcctactctcttgtcatattgctttgaggattaggagacagaggttgaaggggtcgggcagggggcaggcacatcagcagttggctatttaaataaaaatgatttcatgccttgaatatgtgggcaatgaatgggttcatgggctggggctcacctgggttctatctgctctggaggcctgtgaacattgatctagactgatcaatggggaaacctcaggttttgccatgagcctatgaggctggaagtagatctgttaacagaattcttgcccggttccgcagccgcctttgagcccccaaataaacacatagacttattacattaatcataatactgttagttgttgactcaggcttctttttttttttttttactttttttattcttttattagttcaaattaggaacaagcttgtttcacatgtcaatcccttctccctctccctcccctccccccagcatcccacctgcctctagccatcccccctccactccccaggcagggtaaggccatcaaaaggagctccccaaagtctacgacatcatcctgggctaggcctaggcccttccccatgtgtccaggccaagagagcatcccttcatatgggatgggctctcaaaatcccttctttttttttttaagaccttacatatttatacagtgcgttacccctgtacaaatggaaaaaaaattaagttcaacatttctagaacaatatggctgttaatttttgtacaatgccaattcaacacggtaaactgggatacttttttccaaagttgacagcacatctaaagtttccaaaaattcaaattatatatatatataatttgaattatatatatatatataatttgtatatatatacatatatatatattatatttatataaaaagaccaataatggcagtatgttatgcatcaatagcagcaacagcttttccaggttctgcagtaatttgaacaaaattgtagagacatccagaacactccattaaaaaaaaaaaaaaagtaaaaaacaaaatcccagaaaacagcacagttctgttactcttgtggtacctggcaccatttttttgttgttgttgttaattagcttctcaatcaacatctggaaagaaaccattctgagcaacatcattaaaaacagctctgataaagcacagtcactactatgtatcataaagcaggtccacatatgagtgaggacatatcatgtttgtctttttgtgattgggttacctcgctcagaatggtttcttcgagttccacccatctgcaaagtccactaaatcttcctgttctggtcctgggcccttccccatgtgtccagggccagagtgtaacccttctcgtgggatgggctctcaaagtcccttcttgtgtcagggaaatatactaatccaccaccagagcctccctggagtgcagaggcctccttattgacatccatgttcaggggtctggatcagtattgtactggcctcccagacagcatctggggtcgacgtgctctcccttgttcaggccaactgttcctatgggtttctccaacctggtacagaccccttcgctcttcattcctccctctcttcaactaaattcccgatttcagctcagtgtatatttgtggatgtctgtctctgcttccatcagccactggatgaggactctaggatagcatagagagtagtcatcaatctcattttaggggaagggcttttaggttatcctctccactattgcctgcattgtcaggtcgtgtcatccttgtaggtctctggagatctctcttctcggacctatagtggctccctctgatatggtatctctcatcctgctctctctcctctattcttcccccaactcaatatttctgctcctccatttcctctcctctcctcttcttctcttgctcttattgtagcagctgcctctcccctaccctcatgctcccaattagttcaggagttcataccacttcccattcctggggactatttatcccttagagtccttcatgtttcctagtttctttggtgaagaggaatataggctggtaatcctttgctctatgtctaaaattcatatatgagtgagtacataccatgtttgtctttttgtgactgggttacctcactcaggatggtttcttctagttccatccatttgcctgtgaatttcaagattccattgcttttttctgctgagtagtactccattgtataaatgtaccacattttctcaatccattcttcagttgaggggcatctaggttgcttccaggttctggctattacaaacaatgctgctatgaacatggttgaacatatgtccttgttgtatgaacatgcaatatttgggtatatacccaagagaggaatggctggatcttgaggtagactgattcccatttttctgagcaaccaccatacttatttccagaatggtcttacaagtttacactcccaccagcaatggaggagtgttcctttttctccacatcttctccagcatagattgtcattggtattttttattttagctattctgacaggtgtgaagtggtatctcagggttgttttgagttgcatttcactgaggccaaggattttgagcactttcttaagcgtcttccagccatttcagattcctctgttgagaattctctatttagttctgcaccctactttttaatttcattgtttggtgttttggtgtcttcaatattctagattctagtttactaattctagattgctgtgactcacacatcttacgatgtaagtagtgtttgctactcccaagatcaccataggttctgccattgggtagaattcttccccaaacagaatacatagggaggtgtagcatgaattctaattggtattaataataaaaaacccagagtcaggtattgaggttaaagctgaagatcagagaagcacagtgggcagtcactcgagagttctcacctctaccaaggctcagacaaatggggtgatcctgtcctcagattgcatttccaaactacatctgtctccaccaaacttcagactgcactgtgctcctgtctcctccagccttatattcctctctagtgctgggattaaaggtgtgggatcccaagtgctgagatgaccttttatgagttctgtttctcttttagctcagggtggcattgagctaacagatccatctgcctcagtctctgagtgctgggattaaaggtgtgtgccaccactgcctgtcctctatggctaactagtgtggctaactttgcactctgatcttcaggcaagctttatttgttagatcataaacaaaatatcaccacagggagaaaatggcttcaacatggatttttttttcaaaagggaaagaaaagcactaagacaagatccgaccctggggtgtagaaatctctatttcttgccaaagataacatatgtaaataaagctgtggtctggtgcccagtcatgggtcagatctctgacattcttctacatgcagatggtcagcaatttgttggtttatgtgggccctgctgatttttccagacaacaaagctgaggtgcagctgtcttctgccaccatcacctcccagagacccacacaacctgtggtgttactaggtcttagtactcctctaagggtactaggcctcagtactcttctaagggtactaaatctcagtattcctctaagggtactaggcctcagtactcctctaagacttccctgggagtcttcttttctaagctctaacttaataactcttaacttttcctttccccttttgtatctctactaaaatcctaacaatggcaggtgtgcttaggtttctagaccgaccttacacagcttggaggccattgaagtaggaccctctctgcagccctaggcccacctttcatgtagctggtaatggcaaaaagggagtatcatagctgccccttgcagaagactgaaaacaccataggcaagggaaggattgggaccaggagctgaagtcccccaaacgttggctgggctttctctgggccatgtagacacttgtgctggtagatggttctgctgcccatgggaagtacttgcccattccctggagatatgtctgggagctggcttccaggctgggtttggctcatctagaccttggcccttggggccacctagtgccgtgtcttcttccactcctgggatatgtgggcatctgcctccaagtagggatctaaaacaccatgtttgcacacttcttcattagggcagccattgtgggatcacattccacgttctccattcctcccagcatgtcaaaactcccagtatgcttcttacccaggtaagcacgggaatgcaacaagatggagaactgagatcaggtggatgttgggcccagaaatggccatgccgagcaccccacatcctgtgttagagagactgggctggtactcacctttgaaaggcttgccctagtaggactcaccacctatgcctgtttctgtagggtcacccctacccctagatcatgaagttcctgatggacctgtgagagatggtgccatcataatagtacttctggccgagctagatgaaattctttcagactcttggggtcaggtcacagtgtggctctagactaaggtctcccttgttggtgtgcaaactcaggtagctcttcatggcaaactggtagctcagtacatcttcgtctatggcagctgcttcatgtgtggtctggcaccagggcagtgcaggtgaaggaggtactgagctttcccattgaattgggggatggcttcagttggtccacctttcttttctcaagcatcttctggtgactgctgagattttatttctcttaaatccctgtagaggagttaaagtgtctctccggtcttagcatttgtagattttaaataataagatagaacctgtctggcctttgcctcatctggatctgttattttcaagttctccacacggaagaaatttgagatattgaacttgtccaagagggtggagtccttcctgcagggtgatgataacttgcctggcaaaaatggttcatcagtcagcagtcacttaggttcttggccttgatattcagctgtaccactgattcataggtgcaggcatcactagttgccttgacaaccatgttgtaggtgttatcagtgaatgcagagaacagctcgggacagtggtaccacccttagggatgcacagttcagtttgatgggggacttctcactacatttctcttcattactgggggtggtcccatatttcttaagtcatagatgggcagtcccaggctacagagaggctgtggtggtcaaaggtgagcattgaaattggtctgtgtgatatctggcttcttgtcactagagatgtgagtgtactcagcacagataatgtacatcttatccttctgctgctgttttttcttacagtggctgtggggaaatgggcagtaaaagtaattctcactttcctttttatttagtctgtgaccacaccctatggaatagtacaatacccagaattaaagcagggcttttccctctctcactaatctagaaaatccctccctggtatgcataatggctgtctcctatgtgactttgtcacatccataatattagccatctcagcgggatcttggctgggactacaatggagaagcccgggaatcatgatctgtgatctgaagaatattcagaccataaaacaaaacaccagaaccacagcagctctgggggcatgctacagatggggtcactctgtaaattcagggctgtcaccagctgcatccatgggatatgaaaggcactggatttggaagtgagacacagtaaagtgggttcctttctcttcaatgggaagtgttcacaggccctctaaacttttgtttttatgagggtttgtagcctgaaacataacctctaataaaactagtctatcttgaaaccctggtcatagaattgtttaccttcagacaaggtggggaattttccaaaaaccacccttttgtgtgtccccatgcagacttaaggtgtcattctataagaccttaagtccttagatcagctaaaacacaccaacagagtctactgcagaaagttgtgtgccacatgtgtctatcacaggagcaactatcttttctttattgagcagaaatcatcttgaaactgttgaagaaaaacaagcactgaaagggctctcttaacaggccccaacatagcaaacacatgttggagcatggcaagcatggccctgacaggtttccccttttatccttctcccccttgctaaaaagccattaagttagttacattcctatagctagcccccaagtttcattctcttatttagccactgaccgctcctgggacaaaacaccaaggtgccacaataaaaattcactgtcttactaacatgtccaatcaggacctaccagctcaccctagcacagattcctgccttttctccttaaagacccactcctgcagaaacacctgcttgctgctgctgctgctgctgccgctgctgcttgctgttggctttgtagtctccccctgcccttctgcttgcccctccaggtaataaatctctgtagttgtgtgggtttttttttctctttgctctttgggggcccaccacccagctcccaaataaatacacggagacttattcttttaaatgcctggccttaggttggcttgtttctagctgccttttttttttttaacttaatttatcccatctaccctttgcctctgggattttacctttctctatttctgtgtggctggatgactggcccctggcatccttttctcttccttttctcactcctcctcctttttgttccttctttctatttattctctctgtcttgcagcctcacctatcatttctcctgcctagctattggtcattcagctctttattagaccattaatgtgtgttaggcaggcaaagtaacacagcttcatagaggtaaacaaatgcaccataaaagaatgcaacacatctttgcatcattaaacaaaatactccacagcataaatgaatgtaacacatcttaaaataatattccacaacaaatctcctttatgctgacaagttggtgtctgggtgtgttctgtactgttggggtgggtgtgggtgtggtcctcctttacactcagaataaaactaaataaatatccatttttaatgaaaatcaggtccttcccaaagtaaaggcagatctcttgttggaatgctggtcaaaatgctggtagataaatagtgagggggataacaaaagcctagagagtctcacagcacagcctcagatgaccccgctcttgcacacttggagtaaaccagcaaaaaactcatagtcatatgtctgccactgctccagcaagttctgcaatgtgaagtcaaagtgaagattagttaattctccacagaggtgaacatttcatttatttagtttgtttattaatttatttgtggttttcgagacagggtcttactatagagctgtagctaacctggaactcactgtggagaccaggccaggctggcctcaagctcacagtgatttgcctgcttctgcctctctggtgcttagttgaaaggtgtgcatcactatacctggcagagatgaacattttaaaggagttttgaatagtccttatttacaaggtgtggatttgaactagaggaatgaagtcagtatgcagactccatagagaacatgttaaataggcaagggaagcaatatgctactttaaatacagactacttgttggctgttacacaataataaaaaaaatatccatcaatgtctttcattcttggggcccaggaaaagtatgagctgtgcggccctcccctttcctcatgtttctcaactggtttagccagatcccagagtaaatgataatgactttttctctggggcaccaccaggctaaaccagaaaccaaagaaagaaagaaatcacatgatagctaacctttgttgtaaacttgacgtcatctggaatcaactagaacccaagcagtcaagcacatctgtggggaattttcttgattggatcatttgagatggtaagacccaccttaaatctgggctacaccatcaggtgacagccacataaaagaacatgaaagaaggaagctttttgctttttgcctgcttgtcctcattctctgacagggtcatccccctgttgctaaggtatcacttttctgggagagactgaggaccgtctcagacatccagccttatgtattgaacaacctactggattcttggtctttctgtaagaaagcagccattgtaaggaagcggctggacaagcctgtaagccactccagtaattcatatcagttttgttcctataaagaacccgacgaatacaccatacaaacatattggaagtagaccttgaaagacaactttaggacatcagcccagatcagaatgtggcctgacggatacctatgaaatagcctaaaaagccttgatgtggcatttgaagatgtaagatagggatcaaaagcatacaaatgtcccatcccatggtggtcactctgatgaccatatcctctgattctgtaggcgtgcagagatagaacagcccctcccccacccagggagtgtctgtcctgacttcttttcctctattcctttccctccactctctgcccaccataacgtgaagtgctgtgctctgctctgcactcccactatgaaataatctctgaacctgtgagccagaatttctcccaataattccttaggtgttttggtcacaatgccatgagaatgatgccgtaggaacagtcttcaaatggcaaacagacacaactacatgacacagtgctaactgtagctaaagcatttccaaatttcctcttctttggaaggtttatatccactatgggaacctaggagctgctccaattgaggtggaccagagtggctttaaacatggagtagcacgtcaaagaaaggaaagggatagaccagagagaaggctcagaagttaagcatgcacactgcactttcagaggacccgagcgctgataaactaactgggcatccgtcaatatagaagggggataaactttcagtctatggattcagagacagcatttacctgcagttcagactacattgtgtaccaaggagtccacactggtgaaaaacctgtggtggtttgaaagaaaatgccccccaaagggagtggcactattagatgtggccttgttggaggaagtgtggcaccttgggctttgaggtctgttttggtgaagcttccctcagtgtgactgtcagtcaacttacttttgcctgcaagatgtaggactctgagctatcgctccagtaccatgtcggcctgccctctgtcatgtccaagatgatcatggactgaacctctgaaactgtaagtgattaaatgttttctttataagagttactgtggtcatggtgtctcttcacagcaataaaaaccctaactaagacacaactcttctctaatggtttgaatgagaaatttcccccataggctctggccttgaacatttggtctctagttgttggtggtatttgggttgtctaggacatacagccttccaggaggaattatatcagtaggggtgatctttgaagtttcaaaccctcatgccattccaaactctctctctctctctctctctctctctctctctctctctctctctctctctctctcttcctcccctcctctctctttctccctgctttgtgcttatgtttgaagatttaagctctcagcttttgatcctattatcatgcctgtctctcgttgccaggatggacttttatctctctgtaacagtaagctcagtaagtcctgtataaactgctttagatatggtgtggggggagtggaaaagccctgagtgattatgttaggagagaatgaagcctgagtggatgtgcattattgacaagaccccaatagctcagacttatgggacttggcaaagtcttccttgggtcaggctcagaaaattagcaaagccttcctctggtttgcatgcaaatgctgacagagtgtacagacagcatcaacctcagcctcctcctccagtcatgctgaatatgacaataatgttttatcataacatagaataacaaattaccttctgattcaaagaaagtgggaaagcatcccatgctccattttcatatatttgagcatcagagaagctacgttgggaaaaacttcagctttacattgattgtattagagaccagaccactcatacttggaagaaaacatatgggaaatatatgtggggaagctctgaggaccagagtctaatgcttccaatgcactgtggaaaaactttaaaacaaaaaaagcctattccctggggaaaaaaaaaacttatgtgttgggtgttttgcctgcatacctaaggaagccagataagggtgttaagtaccctggaactggagttacatgtttgtgagctaccatgtgggttctgggaactgaactctggacttctgaaagaacagccaacactcttaacagctgagctgtctctccagtgcacctttgaaaggacattggggtggccatttgagtggaaaagctcgctcaaagagcacaggctgtcatcactaatattctttgcacctgaaccttcctgctcatcttcagaaagtcttgtaggagctagcactcctgcgtttctgagacgttcacctttaaaaacagtgccatctactggttccatgtaccaaagctggaggaatgcccagagatgtgtgagcattttgggaagagctggcagactgcatagagtcacccagctacaggtggggcagaagcagtccagaagctactgttgactgcctcctttgagcaagctaaatctcaagagactagtgtagtaagtccagaagagaaagtcctgtggggagtgagggagtggggtgtaacgggatgggactatgtactgtgtatgaatttggggtagacagacgcatgcctaaagtcacaccacatgctacattcttccctggtggcctattctgcttaatagccacaggataaaaacaccaatttttgcatgtacatgtctttagcttttgaaaatttcataaatatgtataatataccttgatcaaacctacacttctgtcttccccttgaaacttgttcctgggtacccacaacatatttcattccaaacctcatgtcatctttaaattattattattattattattattattattattattattattattgctttatttaagcttctgagtccaactagtgctccctatatggacatggctattgagtcatctactgggtcatgggaacctacctcttcaaaacaaagtaattgttacttctctaaccaatagtccctcagtgagccatgggacctatgatagatcaccataatccatgctggaattttctaatgactcaatcttgtacaggtaatcacagctactctgagttcatgaatatagtggtaatattgaatgcaaagacagcgtttcacagcatcctccccattttctagctcttatattcccttctaaaatgtccttttttgtaggcagggatgactgatatagatgtcacatcttttacttgagtacccctaatcattctggatattatggagggttgagagtctatgcactaacagttacccactgcaataggagttgaccaaagttgagaacagaaggaatatttccattgccagagttagagatcagcttaaggcattgttggctcaccccacatccatcttgggagcagggcctggcagatacacacctccagtccacatgaccctgtggatgaggctttgctcccaggccttctcacctttcatgaagacaatgctatagttgatgtttagctccataggagtgaaaaatatagctgtttgcccttatgttaccttctaatgatggacaagcatacaatgctctgttccttggccttgatctctgtgaggtagttaaagtagcatagcctttaatcccacaactcagggagcagaagcaggtggatctctgtgagtttgaggccagcctggtctattgagagagttccaggacagccagacctatgcagaaaaaccttgtcttgaacaacaaccaaaaaaagtttatgggcacagacctgatagccaccccagtatcatcccctctttgcaatgtttccagccacatggtagccctgcacggcctcatcctaaaagacatttcttttctccatgtaggtgagatacgctatgttctctcctcctccatctgtctgtatacaagcactgacactggaggacatagcttatttcatgacatcaagtaatactttgaacttgtgcctgattgatgagttgtcagtacctggtctaaaatcatgcacttccagcccagatctctccccataattgaggctattactgagccaagagtgcatcatccaaagcaagaagtgtgcctgcctaggctggcaatagagatcattccttcccagtccatcacccaggagaaggcatccatgtgctgcaattaggagttgataattagctcacccaagcacaggcccagtatcttagtcactgttctgttgctgtgatgagacaccatgaccatggcaactcttacaaaagaaaacctttcattggggtttatttgcaatttcagagcttgggttcattatcctcatggcaaaggagcatggccgcatgcaagcaaacatggtagctaagagttctacatccagatccaaaggcagcagtaagaaaaagactctgggcttggaatgggcttctaaaaccttagagcccacccctagtgacacacttgctccaataagaccacacctcctaatcctttcaaaagtgccactccctagtgacaaagcatttaaatctatgtgcctatggagctattcttattcaacccaccacactcagctggggcaagatgtttttgaccataaaagcactcaggattccttttcagggccgcaggatgagcttggcagaggcgtttctggagtgccacttctgaagggcactagacaggttggtataaattcagaggtagattggctccaggccacatgagaggccttcaaggcatgctacaattgcatgggaatgatgtctatcccgggattctagctgtctaactccttctgcagcctgggtaggtgtgcccattcaggatattttccaggatccacacagggaggatgtgcaccagctgttcagtgcacctagtgtcacagttctggggctgccactgagtgaggaggaccttctgaacaaaagacacctaagtctcctacatgcatttgagaaaggcatgtgaggacttgttgtcatgggactgtagcttaccattttccaggagcatcttccacttggaaatgccatagatggagttctcatggggtcccacccctgggagtgctccttcagtggggagtatacaatggccttggatggcaaggtcatccagggatcattccttgtatttcttatctggaagtgtctagaagatgcagaagcgctcatccagcatgaccagttggtgctgtagagccaacaccttgctgagattggacatgacacaatctcacatgtcttctgggcttgtgggaaaggctgaccactatatggtgctgatgctgcacccactgggccctctgctggccacacagttcttgcaacatgtgctcagtaagcagctgtaggttgtgttctagctcctggctgggtgatgtttacagctttgacactaacttccaccctactcagtactgagtacttgtcttagtcattgttcaattgctatgaagagacaccatggttaaggaactcttgtaaaagaaagcatgtagttgtaggcttgcttatagttttagagattagtttattatcatcatggccagaagtacggctacatgcatggagctgacaaagtagcggagagctttacatcctgatcctgattttgaaatctcagagcccacctgcagtgacacacttgctgcaacaaggcctcacttcctaagtcctttcaaacagttctgctccctggagaataaacatccaagtacatgagcctacagggtccattcttattcaaaccacaatctgcttgtgactgagctggctatagttgtggtagtaaccatgacctgtcaagtcacagtcaccctggtctgacacagttctattttatttagttcaggcccacacactgtggaaatatactacccacatacccacacttaagacttcaccttcaactaagctaatcaatctacagaatttctcccacaagtgtccagaggctgtctcctaggtgatttggggtttagtcatgttcatgatgttagccattatagctgcacacacgcctatgactaggaatgatggcaactgaagtgttctgagaaaagccaaagggccagagggtgatacagacagaggtacttgatagtctagaggagcatgcttagattttattctgcagaaaggaatttgtacaaacatacctgccaatggtttgttggttctaaattaaatttaaaatcaagatgtcatccagatagctcaggaggaatgtaagccctactgatatttgtttaggatttttcctgcccctgccatttagacaggatacagatggaaggtggattctcagagacaagactcacctggctagaaggatcagctcaactttaaattgattacagtttagttctgactctctggggatgggggaaataaagaaggaagaaaggaaaacaaaaagaaatccagggaaggtctatttctccaccttcccaaatttccagctcagctctttgaatgaagcagttttgacacagatcacaaaaaatatgacttctttgtgcccaccctccaacccacaccctgccccatttctagaacaattgaatatagggacaccctgcaaacatgacacatttgtaatcaaaactatctgtgacacatctactgatattgggttggttttgtgaccctgtgacatgagttattacaggcagtttgagaagtctaaaatctagacgattctggtctgtctgcatggaaaacatgggttcattttgtggcctcagaactggcatagtcatcctaaaacttaatttgtgtttattgcagaattgtttgacttatactggccataaggcatgagctgatattcaggaagtcccaatgtctactctagctaccctgctcctgctccaggctcttccaagagaggggaccctcccgaaccaagactagtgtggtgggaaccccagtcagccccatctccatggggagtaaggaaggtaagggatcagtcactgatggagaaagaagtttgtgtcatatatggctaaataaggattactcccaagagaaccaaggtggaggcttatatagtgggaaattaccaatacggagccaagtggaaatataagggtatttaatagggaaaagcctcacttacagagcaacctagccagccggcgtggcagcggtctgtacgaaagcccaaaaagtgaaaccgaaagagagaccgcaatccccttcaagtctcgctctacatcaccctgaccacgccctcgaaagcgtggtcaggcacacctgtacccagctcctaagtaggcgaggctacagcttcccctacaggctcatgccttcactgtgaagccaagagataatgcaaactagaccctttgagctgatcatctcccccagaagtaaggatgaatgagacccgaatccttactctatcatcctgggaaaaggtcgtgaggaaggtgctcctctgctccatggcttcctcaccctactatgggctctctggcccttgagctgtgagtagttccttgtaggcacaaggaaggaggctctctgggggaaggaatacttgcttactttcctgtttctcgatctgttctagcatgaaggcaaaaccaaagtaggcctgaaattttccaatacagagaaaagaagggataccaagcctgctttgagtttgaggttgaaagtgcctgaagtaggctgaagagatggctcagtcattaagagcacacactgctcttcaggaggaccagagttcaattcctagcactcatataacagctcacaactgtctaactccagttccagggatccaacacccatagcaaaacagcaatatacataaaatttaaaaaaatttttttaaagtaccaagcagtggtggagaagatgccatttatgcccttcccctataatgagattggtgtctaccttggttaccattcctagagccttcatccagtagctgtttgaagcagaaacaggcacccacagctaggcactgaaccatactcctgaaatccagttgtggagagggaggagggatgagcaaaggagccaagatggtgctgcagaaacagatgacctgacttcgtgagagcatggagaccctagtcataaacctggggaaacagtattggaccaaaccaagccctctgaatgtgggagccagtcaggaggccaagacagtctatgggacctctaacagtggagctagtctttatccctagaacacaaatggactttgggagcccattccctatggagggttactgttgcagccagatacagcaaggagggcctaggccctcccccgaatgatatgatggactttgaaggtcccctgtggaggtcctcactatcctttgggaggagttgggggatgagttggggggttggtggggaacatgggaggatgggagggtgagggaatggggggatggatatgtaaatatgagtagtaagtatttaaataaaaagaaaaaatatgccttaaaaaagtacttaagtacacacaagttggcactgctatgagttaagataggtggacaaatttggcttgtataggaaaatttcattgggtgctgttacccttttgtgggcagggctgcttcagctattcatccagaactcacatgcctacttccggggtgataggacaaatgctctttcacacacatgcatcttcccctagcccctgcttctgctgtttgtgtatgaacaaccgagggatgattggggaagaaaatggcaagactgttggctgtggggctgtgggtagggctcagtggtacaagacttgcctaatacacccaaggctctggattacatcccaatcactgtataagccagtccatgaagtaaaggcatttaagagttttccatctatgtgcatctagtgctaaggtggatagacctatagagaccatgtgatttgcaaaagccaacagcagatgttagctaagctgttgccagtaacagctagaggcaaagaagaatcagccagcttgggatccactctggatccattccctttctgtctctcaatagaaatgagcaggcttctaagaagacatcacaacaaaacataacaaaataaaatatagtaagagccattacattcaagttggacatggtacatcaacagaaggaaaacagtcccaagagaaagcacaagaatcagagacctactcgttcacacactcaggagccccataacaggttaagattttggtttactcctctggcttctttgcaagttttgattggttggttggttttgtttgttgttttttgttttattttgttttttgttttttttttgtctttgattttctgcagattagaaatatgcttaggtacaactttttggtatttctcttgtttcgtgttctataaactcaggccttggtttgacacttgctcttagttgtggaaatcctcagccattgttgttttgagcactctttctactctactctcttcccattatataatactacacacttcattacatgctttaagattgttcctctggagccgggtgttggtggtacatgcctttaatcccagcactcaggaggcagaggcaggcagatctctgtgagttcgaggctagcctggtctctagatcgagtgccaggataggctccaaagctacacagagaaaccctgtctcgaaaaacaaaacaaaaaacaaaccaacaaacaaaaaccaagaagactgttcctctggaaaggtgtggtggaggattcctgtaattccatgcagtggcaaagcaagaggattagaagttcctggaattacaagcatctcctttctccgtgaacactttcttatactattcctctgatgattctatccctgccagctctatctggggtgagtgtctggatgctgagtctcctacactggctgtctataattcacacctttcctatcctgtttttgcatccttgggtgtgttttgttttgttagttttcttcttcatttagctaacacaatatactgttatcaatagaataagagaaacgaagcccagcacaaacatttccccgacctctcctgatacaggacacagcaataaaggctcagcaaagtagaacaatcagaatgcatctctggcctggaaaagacatcatctatgcagagctcacacctttcctcacactcagggatgaaagactggatcctttctacttcctttctactaagaccaggaatagacaaggatgacactcatgtcttttagtcaatgttgtctggaaggttccagccagggcacttaggcaagaaatggaaatagagtaatcaggattggaaaggaagaagtagaactctaattttcaaatgcctatgacaatttttgtagaaaattctagtaatccacttatcaaataagctatgcaaagttacaggattaaacaattgattgcagttttctaagttagcaatgaacaatctaaaaatgaaaccaagacaccagttccatttactatagttacaaagagcacaatgttttggaatttagaagaaagcaaatgcaaatctgtattcttgaagctacaaggcatcattaactgtgtcaatgagatagctcaacagataaactcacatgccatttatgacccaacaatctcagtttcacatacacgcacaataataataataataataataacaataataataacaataaataataataaacaacacagataaagaagtatcatagaaatatttcatatctcataaatccaaagacagttgaagtaagattttacactcagactggctaaactgacttaaaactggtgaccattctcttgcctcaatcctgggactacagaagaagctgcctatactaccacccctggtaagttaatattattgagataataataattctcaaattgatgaacagatcaatacaactcttatcaaaatctcagagactttctgttgttcttgtagcagaaattgagagaaggaccccaaaatttgactagaaactcaaggaactagatagctatcaaaaggaatggagtctcagactgcctgaatttgaacacaccacacagataaaagcaaaagagcacatagtgtgcgactctttatgtgaaatatgcagactggacaggtctacagtgatggagagtagattagtggtttcctaggcttcgtttgagggaaatgagaaccttaactgctgacggatctgaggttctttgtgtggtgagcaagactttctaaagtagattgtggttgatgggtgcgaagctttattgaaaactaattcagttgtgcacttgaaatgaatgaattgaatcatgcatggattacgtttagataaagttgctttaaaaaggaatttaagacagtacataggaaaaaatcttttggaagtggtacaaaggggcttgaaagagagcccagtggctaaaagtacaggctgctcttttagaggacctgggtttgatttgcagcattcatctggtggctcacaaccatctgtaactccagttcccagggatccaatacctgtgtggcctctgtggacattatatacatggagcacacagacttataggcaggcaaaacagccatatacataaaataatttttattagttcatattaggaacaagcttgtttcacatgtcaattccttctccctttccctctccctcccctcccctttacccttcctacccgccaccccatcctccctccattccccaggcagggtagggccctcaacgggggctcctcaaagtccaccacatcatcctgggctggcataggtccttcaccatgtgtccagggcaagagtgcaccccttcaggtgggatgggctctcaaagtcccttcttacaccagggaaaaatactaatccactaccaggggcctcctagagtgcagaggcctcctcattgacatccatgttcaggggtctggatcagtcctgtactggcctcctagacagcatctggggttgatgttcccccttgttcagaccagctgtttctgtgggtttctccaacctggtaacaaccccttcgatctttgttcctccctctctgcaactaaattccagagttcagttcagtgtgtatctgtggatgtctgcctctgcttccatcagccactggatgagggctctaggatggcacacataaaataatttttaaaaagaaaatcaaatttttctttttaaaattaaagttattaatttatatgttaatcattaaaaatcctgatgagaatctttcaattaatgaagtgttctgtttgtttcttttgctttcctgcctgtttcttcctatatatttcttgaaattatcactctttttgttgttgtttgttttcaagattggggcttgctatgtatccccaacccccctaatggactgtacttaccatatggcccaggtgggccttgaatttgtggccctgcttctgtctcagcttcctgagtactgggactggtgtgtgctgcaacactcaacctattatttccaaacactgagtgcatgttttccaatattttgtgatccaaagctgttgtcctttacatgtggactcctttgatatcaattcagatagccccagttgtgtgatgtgctgagattttatttgtgtattttatttgttatttttaacaagtaaagtttgcctgaagatcagagtgcggagctagccaccagttaaccataaagatcaggtagtgttgacacacatctgtaatcccactacttgggagtcacacacctttaatccctggactagggaagtagagacaggaatggatatggctgtgcagacagaggaatataaagcaggaggagacacagttaattggattcactctgaggttctatagacacagtattcagcttgtgttcctagagacaggattgcccacttggtctgaggattcaggagaggtaagaactagtggctggctgctctgcttctctgatctttcagcatctatgtcagattcgggggtttttattattaagaccaagtagaatttgcactagagtgtaagctatctttctccccagttccccctctctctctattctatctccctttccccttctcttccatgttgtcttagttaaggtcactattgctgccatgaaacaccatgactgaaaaagcaagttggagaggaaaggatttattggacttacacttctacactgtagttcatcactgaaggaagccaggacaagaactcaaacaggccaggaatctggaggcaggagctgatgcagagtctgtggatgggtactgcttactgtctttctcctcatagcttgctcagcttgctttcttatagcacccagggccaccaatctagggatggcaccacccacaatggtctgtgtcctcccctatcaaccactaattaagaaatggccctacaggcctgcctacaacactattttatggaggcattttctcaattgaggctccctcctctgataactataatttgtgtcaagttgacatgaaaagtggtcctcctcttcctccccatcctctttccaaatggatttcctcttgaatttttgaaggcataaggttaagagttcaatgttttcttagcctataaaacatccagaaataattgtgactatttttctttttgtattagacgtttctttcttctcctctttcctttctcttcatattgtccctatgtcaacaggataaggaatctaaagaatgtatgcaatttggtccttgtgacatggctatttaccaccttccataagaaaggcagatggtctgtcttctcagatgtttttaggagatatataaatagtaattttcaagagagcttaaattaaaaacatttctgtcttttgatatggccttgctgtatagttgggctagtctcaaactctatattactgtctcaccctcaccagtgctaagattactatgccactacacctggctaaaaaacattgctttctattatgacttaagcttatttatcttaatatattaaattttcctttataatgcattcttagtctctgtttttttagtacttatgtggtatatgtgcttggatgcacacatatttacagcatatctcacaaattaattctacaaattaaggatgtatagtttgcactaaaattaatttattcagagcatgtgtgtatacatacacacatacacacagacaacacacaaacacagacacagaaagacacagacacccccacacccacacacacagagggagggagggagggagggagagagagagagagagagagagagagagagagagacagagacagagacagagacagagagacagagagagagagagagagagagagagagagagagagagagagagagagagatggtttctctaggtagcacttgctatcctagagcttgctatgtagagtaggctggccttgaatttacagatactgcctgcttctgcctccaaaggtctgggattaaatgtgtaccatgcctgacaaaacacatgtttttacatgtttttaaatttaatagctgaacacattattttaactatatactgggagtgtttttatattaaattctgcaaatgcatgggctgaaattagctaagtcaacaccaccttgaacttcaagttgggcacttttagaaattctcctttggggttcgattactatttatattggagtctaaattctaaaatgagcagtcattctcctgactgtcagttcaagtgctgacatccagtagctacgcactcaatgtttagacaggcagaaggaaatggagcagtgaggcaattatctccatctccctcccacacgcagtctttgaaaacagcagagcaaatagctagttgtctccaacagttgagttctgtttcctctgcccggaatgtgcaagtgattgcatagttctttgtgtacttttgcctgtgttctgaacctcccattggacttcaactgttcatcacagtcttctgtgctcatgaaataaacatgaggattgtcttggccacatccagctgtgaggacccacagccaccgtcaagcttgagctcaggaaggtttaaggataatttcctctgtggcgttctcatgatcatcaggagaaatgtcataatgataggactgtacataaatatagaaattaatctttttaaaggggaatgtggcattaatatttgaaactgggaaggggttgacattcccagggctcgaaggagacttagagtccattaaaggtaactgtaccattgagttatacagccagtctccaagacttgtatgtgtgttcatgtgaacacagaagtgtatgcacaggagcagggtgggggtggggagtgagagccatcttcctcaatggctccttacctgagacagggtctcctattggcatgctagcctgcaagtcccaaggatcttcctatctatgcctccccaattctgtaattgtactagtacagtgccccatccagctttgtaatatttttttttaattttatgtgcattgatgttttgtctaaatgtattaatgatgtataagggtgtcagatgcttggagttagagagagttgttagctgctgtgtgggtactaggaactgaacctgggtcctctggaagagcagtcagtagtgctcttaactgctgaaccatctatccagtgccccatccagctttttatgtgggtgatggggacttgaactcaggttttcaagcttatgtgacaaaggttttacagactgagccatctccttagccaagtcctgacattttaaagtgccaaactttgcccagttttgggatgtcacacaaattctaaatacgttgctgtgcaaacttgaagacatagttttactagtccttccatagtgtttgtgttttgtttttacggtttttatccaggcaaggtttctctgtgtagccctggcgatcctgaaactcactctgtagaccaggctggcttcaaactcacagagacccacctgcctctgcctcctgagtgttgagataaaaggtgtccactaccactgcccagcaaatccttctacagtgttaatcattaataactgccccttgtattttagtgtcagcatttgtttattggcccagtcttgctagacaccctggaaacagtaagagtttcacatttcaacttaggagtttatcactaagaggtaagttgcaaaaccatgctaacagtcttttccgaagtaaaactatcaagtcggagaaggggaaactgtactctttactatttttataatgttcaaattcataaataaaagttgatgactgtgcaaagaatgtcagtgagggaagttacccgcatgcaactcttacagttctgacctggataggggagtcgagcttgaatcagaaatgatctttaatgtcttttccattaaatggaaagtgtgtgcttgtcaaactgccatgtaaatatttacatattcgcccatagaccagtgcttctattttcagtgggaggtggtccccgtcgagactcacacctggtcagagtcctcataatacatgactaatgaatgcttggccctcagtaggacaggcaggatcaccctctccaaggccaagggaatggggaacattgcagaaaggcgagtggaaaaaagttgggaaacctagaaaagggggccgtcttctggaaggatgtctttcagacatgacaggacgtgaccatttgattcacagcagctgtgatgacctgcataagaccttcacaaacccaggtgcttcagtaatcagtcatgaagaggggagcggcttacaaggccccactgctttctgagaatttgcaggcagttaagggttgtccgggaggaggggttcactagccatccctcccacttcccaccttaagcaattggctctttatggttattgacaaagagggagatattttcaatggtatagctactggtaagttgtccatgtgcctgtaaataactcctcctccatgtttatcccctcccaaatggcagaaacagagaaggagaactagtttggaagagaaaacagatcagcaactgggaggcagacaaaagagggtaatcaggtacaaatatgatcaaaatatgttgtatagatgcatgaaaacataataatgaaactcaccgttttgcataattaataatgctaataaaaatcagaactccccgaacagccttctggagaaaattaaggctttggaaaggtgagatggctaaatggacaaagagctcactgctaagctgatgaccagtccctgggacccagatgatggaaggggcgtatcaaatcccctaatttttcctctgatgtccacacatgtgttgaggcacataggcttctgcttgccaaaataaataaacatatttttttccatgacagggtttctgtgtacagctttggagcctgtcctggaacttgctctgtagaccaggctggcctcaaactcatagagatccgcctgcctctgcctcctgagtgctgggattaaagacatgtgccatcaccatctggcaaaataaacataattttaaaacattttaaaaagaaaattaaggtttctaaaggctttctactatccaccagaatggatgggtacagagacaatatttaaatatgcaaatgtgactcccataatttctttttattgtttatcggggaagagtgagtgagaatgcaacccccctccctccatgttcacaaattgtgctctccagtttactacttttgagcggcacagggagcaagcacatcccaactgcaatggacaagtctcgctgagaaaactaccttcatgatcatggtgtcatcgctgcaaggtgggccactcctgtattgtcatctcattgaaatgtctgcatgcccaggtttaatttttcacccaaaggatcagttccagggtccttgatcaagttccttcctcctactgctctttagttgctgttaatattcctctatatggtcacccctcttctttccctcatcacacttctgatacccactaaatggtgatgacagattggaacttagtaaggtgtttataagaaaaacaaacaaacaacaaacttatcgactaagttgctgttgaattaagtaaatatgtgttttgtttcatccaggaagaaatacttgcatcactttaaagacctacaccaaattatttttgaagaattgaaggagggctgggaagattgctcaatcagtaaagtgcttaccatgaaaacaggagaacccaagttcagatccccagcatgcccataaatgcctggcagatgtggctgcctgcctgccatcctaatacttaggaggtggagagagggggtgtgacttgtagtttcagcaagtagaattcctttaaaggattagttgattaaaaaaaagaaagtaaagacagtttatcatagcccatgtaggccacagacttgctatgtaactaaagaagacagtgaatttctttctttttgtccaatttgttatttaaattagaagattgtttcaagtgtgaatcccagttccctcttcctcccctcctcccctgcctcccactaacaccctacctatcccgtatcctttctgctccccagggagggtgaggtcttccatagggggtcttcagagtcgaagacagtgaatttctgatccttttgtctctaccttttcaagtacagggttaacggatgcacaccaccatgcttggctctatttatctatgtatgtatgtatgcatttatttattttacatgtatacattgttgatctagtcctattgtctgatagtttctgctgatttcaccacatttctcccctagaaatagtgtataaaatactgtatttcttaataagcttgcttggcataagacatagcttatgcagggcctctctatcccaaacttctcatcttctgatcccctgatcctctctctcagaaccctgtcactgaagaatgagctgctgggccaggtctatacaacatatttcgatcatatatttctaattatctttccgattaatttttttttaaagatttttatttcttaagtatacagtgttctgcctgcacgcactcctgcacgccagaagagggcaccagatctcttgagggatggttgggagccaccatgtggttgcagggaattgaactcaggacttctggaagaacagccagtgctctcaacctctgagccatctctccagccctccttctaattaatttgtactttataccatacatattaaagtgtatgtgtgtgtgtgtgtgtgtgtgtgtgtgtgtacgcttgtgagcacgggtgcccgtggaggccagaggtgtcagatccaccaaaggcagtgctgagtgacctgacagatgctgggaactacactctggtcctttggaagagcattgcatactcttaactactaaggcatctctctagctccctgattaatttttaaaatgatctatcactttgccctgagtacagattatattatgaagagtttgcctcctaaattcatcacgatctttcaaaaagtttaaaaagatttttttttattcctgctcagtattttttatctctaggaatgatgtaggttaaagatagttactgctaacttttaaaagtcacattcatttgtgtgagagcagatgcgcatgcagctggcacagtggcacacatatggaactcggagtacaactccttccaccgtccagagagcaaactctgatggccaggcttggcagcaagcgcccttatccactgagccttctcacaagccccaatttttattttaaatagaattttgtgttcccaacaacttagggcaacgccacagccaaagtgagcactcattctatgtcaaattccttttttttttttgaagggaataaggctgataccagtgagtggagtgtgctctagatttgcatgtcttagtattaagctccatatttgaacaaaatgttaaaacttattaagtcttaatctctagggatggtgagccccagggagcactttttaaatttaaattagaaacaagcgtgttttacatgtcaatcccagttccctctccctcccctcctctccttccccccaccgactccctatcctgtcccctttctgctccgcatggagagtgaggccttccatgggggatcttcaaagtctgtcatatcatttggagcagagcctaggcccttccccatgtgtttaggctgagagagtatctctctatgtggaatgagctcccaaagtccattcttacactagggataaatactgatccactaccagaggccccatagatttcccaggcctctaaactgacatccctgttcaggggagtctgggtctgtcctatgctggtttcccagctatcagtctgaggtccatgagcaatcccttgttcaggtcagctgtttctgtgggtttctccagcctggtcttgacccctttgctcatcactcccccctctctgcaactggattccaggagttcagctcagtgtttatctgtgggtatctgcatctgctttcatcagctactggatgaagactctaggatggcatataaggtcatcaatctcattatcagagaagggcatttaaggtagcctctccactattgcttagattgttagttgggatcatccttgtagatctctgaacatttccctagtgccagatttctctttaaacctataatggctccctctattatggtatctctgttcttgttctcctctatttttctccttcctgctccctcatgtccccctctcccctcctcttctccctttctctttctcctaactccctctcccctcccccatgctcccaattagctcaggagatcatggtcccttctctgggggaccatgtatgtctctcttagggtcctcccagggagcaattttaaaagcttccatagatggtccttaaaaattatcttctaactgttcttttacatttacattattacagcactaaaagtcacatctagggtcctacagggatagctcagtagtagaatttagactcagcttgcaagaggctctgagttccctagcacccacctctcccctaatctttaaccatatctagaaaatactccttgtttctagaagctgatacctcgatgtagggaagcagttaatagtgataattcactgctaactacaccacctaacccagctcggcccctgagttcggacgactgcatcatgccagtgtcaatcaaccacagctattggatgcagactagtgcatcctgatgaaacacaggcagattgcttcccctacgtcttacacagagtgattttgtgacactccttttggtttccctacatttttccagtgtctcctgtggtgccaggaaggcaatgatatgagtttacttcgcaggggagaaggattgcttggtgggtggttactctgctcaagattagctagagttcatctcaggtgagccattttccttcaagtacagaagtgaccagagacagcctcactaggtcagcctgccctaccatagttgccatctctagagacagcagaaataataagcactttgcattattgaagtacccttcaggcgcatcaaaaacttgaaggacaatttgcaaagaaattttgcaatctcttttcttgcaagtaggctcttatgctgaatgtcagaggtagtgttttcttttagttatttgaggttatgggaaagcagtgagcatgtcttgaatgatgtagtctttctcactagggggtgtccccaaattttctccaacagtagaaacaaaagtctgtgacaaaccctcaggtttctaacagctacagaacatgtttctaaagatctcatggtggatgctgaaacagacccttgtctgttcacttccattgtatgaaagcacagctaaacacagcactataattgcctgttaggagccagactcttctgtttagttcccaaagccagcaacccggattatctcaagagatgtttttttacattccctcccccaattaaatcatcaaattaattttaaaaaatcattccatatttcaaaaacaaagtcatgttctctatacatagaagagagggtagatgttcttaaatttccaggctctgggatgtcaaaatgcccaggtgactcaatgtcacatattcatttagatatctaggtgattgttacaaagtttcaatgcacagcctatatatcctgaaaccatgttaccttgaaaacacctgaaccatactagggtaagacttttaaaaaaatagacacatcagggttttggagagatgttaagaacaccagttgctccttccacaggaccacagtccaaatcccagtaccctcatggcagattacaaccatctgtaactctagcttctgggaattggatcctatcttctggcctctcaggcacaaggaacacattcggtgcacagatgtgcatgcagacaaaacatccagatccataaacggaacaaaacaccaactaacaaacaaaatcaaaatcaaacccactgtccttatcttttactaggtaattgctaaaaatttcctcctagggtcatttgctttaaaaccctagaatttatttccagattgaagggaccaaccccatccccgccaacacaaatgaggccataaagaaaataaaaggagaaaagaaagatggcaatggctgtaggggagctccaaggagtctggtgtggtggaggcaaagtggggctcagaagggtgccatggtggaggaaaaggagcctgcagggcccacatagctctggaacaactaagaaaaaagaatgggaaagtctgatgggaagatgcttttaaaaagtgcacacacaaaataggaaagaaagatggcagaagatagctgagcagtagggaatgatgaatgcatatccttcaacaccgaatcttagccagcaggctgcaagcacaaaggttgtgccagttgagccatggtcagctgtgtggaggcctagagctcctgcagaaacaggtcattactaaatagggctggccctagacccacaagtcagttcccagcatggagccaccatggttgaggcctgtgctgcttgtcttgctgggagacggaaggcagagccgcaacactgcccacaggctacaagcacagaggtccagcccagtgaggcccagggcagcagtcaccaagggcagggaggtgtgtggcagccaggtactcaccctggacaccttgcctaacagcaacattaccctaactctggctaacagcaggatgagctgttagcaatggtcctgagcaatggtccattatttgtggtgcttcagaaaccacaggtcttgaaacagtccaatgactctttgaagtgaatatttacatgtaaagatgtttgatatatatatatgctatgtgacaccctgaagtttccaatcttgccatcttcccatcttgccactatgatggactagtgaagaattttcaatggtgggaaaatggaagaatggggtggtgcatgcttgatggagagaggcagaactagagacttgaaggcactcacaggtacgagagaaggctacagtgggtgggtgagacagcatgcaccacggacatccacatggtctctggcatcagcacaagttcttgctaagtagaactgacagggtggtgtgtagcagcctggagcttgtgaaggctcaccacccctccccccacccactgcccagccacataatagccctgattatgagcaactttggtatctgtagtctgctgcctcaggccatgttgaagcccaagattcctgtggatgcccacagaaggccattcagatgttggaggtctgtgcctgaggtcatgctgatgtccctggtctgtgctgctgcccgaaggcaagctgatgtccatgggacatgctgatgctgggcgccatgttgatgtatgtgactaggctaccatctgaggcaatgttgatgtccttggtctgtactgccaccagagaccatgctgagatctgtgacatgtgctgatgccagagaccatgtggatgtccgtggtgcatgctgtctccagaaaccgtgttgaagtccatgatctgtgctcccgcttactgtaaaggacaaggaagctacttttgacatggcatcgatgactgtggactcacagttgagaaagaggacttctgtgacaacccctacccccaccaattcccccaaacaaaaaagtaacagcctagacagaaattattcaaagagaactcttaaaaattgtgttgacatacagctctccacgattgatggcttctggtggatgtgtgggtgggatggactcagttttcagtaaggactggccaccaggatttgactatgctccagcgagtttcttcttcttcttcttcttcttcttcttcttcttcttcttcttcttcttcttcttcttcttcttcttcttcttcttttccttcttcttcttccttcttcctcatcttcctcctcctcctccttcttcttccttggtttttcaagacagggtttctctgtgtagctttgaagcctatcttagcactagctctggagaccaggttggcctctaactcacagagatctgcctgcctctgtctcctcttcctcctcctcctcctcttcctcctcttctcctcctcctcctactccttcttcctcctcctccttttcttttggtgtgtgtgtagggcaggggaagccacaagggtaggggagcaggctggggaggacggtgaagtgagtgtgattagggttcatgatgtgaaattctcaaataaccaataaaaatattatgtaaaatataaccgaaaaacctctaattttaaaaatctagcctggtatgcatagagttttaggccataggaggagaatgagatcttacttcaaatataccaaaaaagaaaggcaaaagggagggaaggagggagggagggaagaaggaggtctgagggtctttattttttcttttattgaaaatagattctcttctcctacaatatatcctggttatagtttcccctccctctactcctcccagttcccacccacctcccccttcctccagatccactccctttctgtctcttcttagaaaagaatgggcttccaagagacaacaaccaaacatgacaaaacaaaatatgttaggatgaaacaaaactattgtatcaaagttggatatagcaacacagcagcaggagaagagtcccaagaacaggcacaagagtcaaagacccactcatcctcacagtcgagagtggtataaaaatactaagccaatagttatcatacatacacaaagaatgtggggcagccccgtgtaggccctgtgcttgctgcttcagtctctgtgagctcatatgcaccttgcttagttgattcagagggccatgctctcctggtgtcctccatcccctctggctcttacaatctttctgcctctccttcctcaggatttcctgagctctgaggggaggaatttgatggagacctccaatttggattcactttctatataacatcaggctgtgggtttctgaatctgtccccatctgctaccaggaagcctttctaataatgactgaataagacactgacctatgagtatcgaagaatatcattaggaatcactttattgatttttttagagcagtatttttttattttgtcccaggtctctgggctatctagtctctgattcttgttagatagcaagtgtcaggcaagggttccctctcctggagtgggccttaagtcaaaccagacattggttggctacagttctgtaccatgattgccctaatcatattttacagtcatgacagtcaaaggtttgggggctgtgttggcatccaggcttctttttcagtagcctactgagtaccttcctacagcaaagagactagaatgtaggggtgaagaaagctccatgtaggtatcagctcaacttctccatgttcaatgagttgtgtggatgttgtccttggcaatggggcccactgtcagtttgcagagagcaatcttttgttagcatcagtctgggttgtttgggaaattccctgggaccttcttggccaacaactcaattgaatgcaacccagttcctccactggaagccttgcctgggtacagtcacggttttctgtttgattctcagtagctttctcgcaggccaggatactcactttcctcaggaagccaaagccattcagatgccttccatcgtgtgacaagttaagtctgcctaaacatttggtctatgatatagctgttaatgagcataggaaacacagtttccttgccccatttccaagaggttccttgccccatttccaagaggttccaatgagtttactgggaagagggccaagtgttcaacatttaccagtctcacttagtgagtctaatgtgtggtctaggatgagaatcactggactaataggcaggaaggaacactaaaggtcagcatgcctaagattttggcattgataaatgtttaatgaagaagtactggctgcagggtattgagcagaaagatgatgtgatcaaaacaatagttcattttctcccaattttaaagttataaaagcaacacaactgtcttgtgataacaggaacatgccagaggagaattccacttacggcttagcccagcctctctttcctagcatatttttccttcctgaggcaagctctagggttaattcaacgtatttttttttgtcttttccccatttacttgcatttgcaggtattcatgaaaatatacaaatttgacgccacagactgattgcaattacacacattcattagaaatataaaaacatggaattgtaaacaagacattaaagaaaagcctatgagaagaagaaaaaaggttagaaggtgaatagaagttgactgcaaatgttgacaattaagctgcctggtggtgcggtcctggaattcggttgttcttgaaggtgaagcaggaagattccaagatcaagacaggcctagactacacaagtccttagttcaattgctaatattgaataaaaaaaaacatgaagaagtaaaatcagttttgcatagacaaatagacaaatatttgttatttcatttgttctgttaaggtttatttttactttaaaagttatgtgtttatgcatgtgactgtgtgtgggtttgtgcgtgtgaatgcaggtgtttttggagtctagaagttggcattgggtcctcaggagcagttgtgtcctgagccactgagtcatctatctagctcccatcatgttgtttttggaaagaggagtagaactttatttccatgtttcccaaataaaactgactgggtagatgatttggggggattaaccaaagagcaaatcccatatccacttttgattcctctgactgtacctgccttcagctttggctgagaccacaggagcaccagactcagggacagcagctgcaaatgcagatggaccaatagagaaggtcttgaccttttcatcaagtggggagaggtaccgagtctgcacaaacaaaggcatggcatactggtgtctcatatgatagaatgtgctaccaaggcaggcgttgggtaagcaactgtagacaaacactgtatttgagattccatgggattgtccattatgacattcctgttctgaagcactgagaatatcctgctgagggacacacagtctgtggcatctgcttggggactgcataatccacccaacagaaacatttcaggtaatcactggatgtcatttaggacttccaggacttcatgaccttgggcttccaggtcaccctgtcctttagaggcatcatggaagtgtctcaggggctgccacatgggggttaaagatgatgcaactctaatgaggatgcttggtgagagaagactgcatattcctatgttaattaagtttctctgaatgtatgagatgagaataatttatgctttatgttagtacacattaaatgcacttccttttataacagcatcaaatttaggaacaggggtgaagatggtaaagtcctcacacgcctgacatcgtctccctgattactgtcttctattatcctagcatgtttgccacagttagtaaagcacactttattcagatttctacagggttacctagtcttctttttatatttcatgagtcatatcgtattgtgcctagtcatcatttcttctaggatggcgtttggctatgacaggttcacagagtttccttgttttcaaggactgagaaaaattagggaaatatttgagaagcatttagcatatccctcaactgggattgtctgctgcttcatgactaggttggggttatgggtttgggggagggaaatcttggagacagaaaacaccattcttatacggtcttgaggttataaactaccaacctgtcttccgtggcaatgttgactctggcatcctggttaatgtctggtttctctgatgcaacactttccttgcttttagcccgttcagcccgtactcactggatgactatatgtaaggactctacagattggccctagctgtctattggggcaagaaccaagaggttttcttcttgatatttgtcatgtgccctcaaatttggagcagactactggtgcccggatcttctctctgctggaagatgagcatgggtgcagagcactgctcctctgtggtgattttgatttcttctttataaaaagacacatttattcagcatcaggataagactattacttctagcaatgaacagcatgggtgacaaaaggtctacattacaacactttgtcagaatggcagatgctaaaataacctgttatacaattagtcacaaataccgtcttgcagttctttttgtccatattcatggacacactctaaaatgtcttctttgtagtaagtggctaggccctgtcacctgtgcatgacgaggtcacagatcatttgtaacctatagcctccctgtcacttctctagctttcatctcctgcctgtgctttctttcctggcagtagttagaaccatctgtctccgccagagctactgcagctgctagaaccagcacagtcaccttagttttgtggttctgcaaaatactgtgctttatatcataaggaccggagctcctttattggtttcctccccccattggcccaaagtttgaagactgagtgttgtaatattattatcattggagcttccatcacctcccagattgcctccactaccaccaccaaattctccacctcctccactgtcatggctgccacttttgtcatagccactatcctgctttcccaaaccctgtttaccaactccatagcctctgcttcctccagaacaaccaagctcccctcccccataaccaccaccatcaccaaatccattacggcaatcttgactgctgccatatatctactatctccatggctgccaccaaagccaccatgaccactggggtttcctcctcaaccaaaaatgtcattgccaccaaaaccacctccaggaccatcaccaaagtttccgggaacacttggacctctttggctggatgaagcactggtcatctcttacttcctcaggactagtttcacttcacagttgtggccattcatagtatgatatttctgaatgacaatcttatccagaatcatggtcatcaaaggtgacaaaagcaaagcccctctttcccccagtctgtcagttgtgattttaatcacttcaattttcctatactatttacaatattagtaggtgatattctgcagtgtcttctctgatgctgagaattttgcatggttaagtccctggcctttgagaatcttctgttgacacggctctctccagatgctcaactcttccatgctccctgtgtggccttgcactcacagctgcatccgcttccttcacaacggcagacacgacaaacccaaagcccccgaaatgctctgtgtttgcatgtctcattatcacagtcggtcagtgttccccattgctcaaaatggctcctcagattctcatcagcactttggaagctcagccctccgatgaagagctgttcccgctccctgggagactgacttagacacaatggcagggaggggagagacttctgcaatgcttcttcaaccgcatcagcaggcagaaaggaggtacgtgggggcttctgaacttgagttgaggctcttcggggtgctgactccctcatgatccacatcagaacccaccttctccaaatgtctttctggcagcgctctgcttagacccacactgagaagtgccaatgtccttctccagttgaccagagaagtggtcttttctatctgtgcgcctggatcacaacctgccttctactattgttatctagacacaggactctttgccactcaagtttaacttttaaggagagaaactggctttcacaccttcacatttttctagcacttaggatgtaaggttgaacagtagctagaacattatagaggaggatctagttctaggacattttcagcagaggaaagggtcatgttcctgggagtgattaacccccactcttagcccctggcaagcatccatctgtctccatgcacttacctaattctagacatagcttgtaagttggcttgtgtccctgataacctctgtgtctgacttttctcattactacagtgtttccaaggttcatccacttttgtagcatggctcagcattttgccctgttcccagttttttctttctttctttctttctttctttctttctttctttctttctttctttctttttctctcttttcaaaggaggagacatttattttgactcatgatttacgggatgcagttcatcatgactgatatgtaggtgtggctctgtggtgacaggagcaggaggtgacaacatgtagtctctagagtccagtatttcgctccctttacagggtgaaaaattgcacacttatctgcagcagggatggtgcctctgcctagctctaccactagatggcaccactttcctaggaagtttgtcgcttgctatttaatgaaaccacacaaataaatgtctagttttgttgattcaaaaactgctttcactgcaaagctgactgaggcctaacagattagtcactatgggtccattaacactctagcacactccacacatcccgcatatagctcatatgtatgtgggttaaaggcaacagtgacttctacaggagtgatacttttgagggatatgcttaaaaatacttctctcattcatattgaaagaatcattgtattgcgtgggaatcaagattcactagactcgccggccgttggtggcgcccgcctttaatcccagcactcgggaggcagaggcaggcgcatctctgtgagttcgaggccagcctggtctccagagcgagtgccaggataggctccaaagctacacagagaaaccccctgtctcaaaaaaaaaaaaaaaaaaaaaaaaaaaaaaaaaaaaaaaggattcactagactcagtgctgattaagtgaagtttacttggggagaatgcacttacacaagaagcgagtgaccgctgcaagttccagctccgaggattcacgcaggctgccctctgtgaccccgcagaagcaagagagagccagccacctgtcccaagcccagacctaaacccctaaacccaccgcgtcatgtgcatacgtgtgaccacgcccaaatgggcgtagttagcgctacaggtgcggctggatggctatctcactacatcattgtattattaatcttttagaaacctttcaatgaataattcctatcaagactggagtaaacaatatattgggtatattgtactacttccctaagtcctagtcacatatatgtgagacttggcctgaagaacccagttctgcccatcactgcaggatcataggcaacttgacttcactaggctttctttcttgttttcatgttatttatttttattttatgtatatggatgtttgcctgtatgtatgtgcgccatgcctggtacgcacagggaccagaaaagggtgttttaactggggttgtaggcaactatgagcctctgtgtgtgctgggaactgaactcaggtctcatgttagagcagcaagtgctctaaaccactgagccatctctccagcccctcagtagactttcttaattctctacaaaaaaaaaaaatcctcacactcatgttagtatttgcacaatagtttagaataatcatcataattaagtctcataaatgttatcaacctaaagcaaaatgacactttcagcatcttcattgatcgtcgctggagagggtggtttgaaatgattctatgtgatgacatgaatgtggaaatggagatttctgggagtggaaaggtttatgtgtggagggccttgggagttgagaatgggggagattgggggagataactaatcctaaggatgtatgaaaagccatatgtaaacctgtaagtttattggaaacgtaattttaaaatggtctgaatggagatactttgcatgggtgactaacactcctccaagaaaccatagtttataaatagaaatccagtgtcagatgtagtgtatgagccagggaagctccaggggcccccaaacaatagaggctattgccactgctcttggttgccaggtggtaagaccctattgctgaggacaccatacacttaacttacaggacacacaatccggctggaactcagctaaaaagcttctcctgctgggtagttttcatagtgctggaaggtgttaggcagattgctggaagatacagtcatcaacagttttactcaagctgtgaatcctgtttgctgtaccaccaacatgccaggaaagatgtgcccactgctgcagtagcggcataaaccttagggaggcaaccagcttctttcattttgggtttgacgcccagttcacaggagagaatccatgcctggttctgtaaacttggtcaagactcacaggttctggtaggggtggagtgagaggactatggttatcattttgctaaatggttatgttgtcaagctgccttctaaatactcatgtttatagccactgaccgctcgctgccaatctccctcagagtttcttattctatcaggcaacagtcagtgcagagacacaataactgaagcgccaagaatgggaaagagcagagggcttggttctaatcgggacatctctatcactcaccgaaggctgggggtataccatggaagagtggcaggaagatgaggatggggaggtgtgctgtaaaaacattctggacatgacatggagattgcgctcatgtacagagtgcagacgtggttatctgcataagacctgcgctgattgggcataccaacatttcatcatagaaagaggaggagcttatccagtcccactccttgagggacaatagcagttaatggttgctggaggagagggagtcattttcttcagtggtgtggccactggtaagttcccgttctctagtagataacccatgttcacgcaggcagctctagtaaacctcagtgggccacacatatatgtaaggcatggaaatcagaggggaccgtgttgggaagaaggctttcatgtggagaggaaggggacatgagaaaggataatggggggaggcaaaaataactaaaattcattatatatgagtatttttgtgattgtagcaatttccttgactttgactggaaattcattttcttacattcatttacttctttatatgtgtgtgtttctgtctatctgtctgtctgtctgtctgtctacattatggcacgcatgtggaggttagatggcaacttttgagaattggttctcttgttctactatttgaattttgggcattgagttcaggacactagactctacagtaagtgccttgggcccactgagccatcttgctgactctgcaagtgaatttaaaaatcactaatttattattatttattattattattgtgtatttgtgcctgtgtgtgcacatgcacgtaaaccatggtccatgtatggaggccagaggataacttgatggaaggagttggttctctcctttagtttccttccatattcttatgggttccagaggttgaacttaggataccagtgctgattgccttatcagcccccaaaataggctttgatatagaaacacttgtcttatttggtagtcacagatcatagcctctttgtacacttagtgcccaatatagaatttgacatgaggaactttaaagaagtacataatgtgaagtcaaagggaatgacatttccttcaaattacactgtaaaaattgtaggtgtttatcaaatatttcttcttagacctcaagcaactaatataggaactgtttatttgattcacaggtaaattgataagtgtattagtactacacttattagtactacacaggataaaccatattgtgaaattgttatcagccaaattttaaagctatgtattctcctctagctgacagagctgctcagttaaagtcgcccaagaagtagccatcatttgacaggtggtatacatagccacttacaaagaactcaaatgacctgaatttcccccaatagaaacaacactgctctttgaatgagtagaaagtagtgttgttttgtgaattgaacaggcagcagcaccgattaaatgaggcaattaacacaaaggtttcagctcagtacattgtttgcagcctctttgggctaaggcagctctgctagaatagtaaacaaacaaacaaacaaacaaatagatgaaatggcatggtattgtcagactgctttcccatgacatggtctgatgcttagtaggaaaactattaacatttctgtgggccttggtttcttgtctctatgatgagccactattaatactcccctactgggtcctgataaggtaatgcaaggacaattcagaacagtgatgacaaatgtatatatttcagtaatagttattattgttacacaataataacaataataagaaaagaaaaaactgcacatatcaaacctttgacagtcttgagggattccgtgcgtgaggctttgaaaggaagagggtgctttgtacgacgttttccatgagcacgtggacttgtagagaactgtgatatttaaacacaattgagattatctgaagagaagagagtgtgcaatttcctcctgaatttccaagattatattcattatctttattccaatgacttccatgtccctaactatttgtttgatgggcctttgaagtaacaagaaacgcctccagtccttgccctctgtccattccagcaaggcaattggtacaggttctcagtctgttctgaagtctgtaggtaggtgagacagttgagataccagacatcgtattgtgtgagttttctttgattcttgtcttatctgaactttattattatgaatattcttaagaaaatcaggagtacaaacaaggacaggaattcatgggctgccttctgctgggttttgaccatcttatagtagacataatgaattagtaatctttcattgcagttggccggaggtgtgccccatacacaacctttactatgttgatttatgaaatttgattcgattctgttttggtgcacatgcttaaaatgtagtatcttcttgatgattctccccttaattagttatgcagtgattttctttatctcttctaaatttggtttaaagtctattttgtacagtattagaacagcgacacctgcttgtttccttgttcagttgcctagcatatcgtttccatactttagcctttttcctctgtctttggtggtcgggtgcacttcttggaggcaacaaatatatgcatcattttttcattttaattataatgtgataatctgtgtcttttgatcggggagttgaaactattgtcatttacaactattggaaggtatatattcattttcagcattttgctgtgttttcctgttcctggtttgctcatgctctggtgttgtttattctctcctgtagcttcatggatgtgtgttttctttttcttgtttttttcaagtataacacaactttatacagttaaagtaacattccaaaacataaacagatgtaacatatctttacataaatattccataatagtgttataaaggttaatgtgataatcttattacgtttgtatatgtgagcacaacagctgtattaggcagaccaggtgaggtgggggccacctagcccatgttggaatgcctgaatacatctaggtggggatagacgttctccataatgtgagccatggtataatcaatctatcactttgttcaaaccaaacaaaatccaataccccaaacccaaacaaaccatgttattggggttggagagatggcttagcagctaagaacattggcttctctttcagaagacctggattcaatccccagcacatgcatggtgtctcataaccatctgtaactccagttctaggagatccaatgccctcttctgatttcctcatgcaacaggcatgtatgtggtacatatacatacatgcgggcaaaatgtccacacatgcaaaatattaattttaaaatttaaaaagtttattattattacccctagtgtgtgtatgtttgcaagttcatgcacatccatgaatatggatgtcactatgtggggtcagtgccttccttttacttttacctgggttccagagtttgaattcaggttgctagacttgcacagcaatgccatcttgctgaccaagtattgccaatgcaccctcaattcaatggtttcagggtgtgtgtggggggggttaaaattaggatttcatgcatgctggtcaagcactctgccactgagctatatctcacagtgtttgtgtcttattatttctgcatctccaacagtgaggggaaaaactcagatttgaagatatctgtatactgcattatttttatttatttattttttgcctccatttttaaatttaaattagagacaagattgttttacatgtcaatcccagttccccctccctctcctcctcccctgctcccccctccccccccactaacaccctacttatcccatactctttctgctcccctgggagagtgaagccttccatgggagggttttcagagtctgtcatatcctttgggatagggcttaggccctcccccgagtgtctaggatgagggagtatccctctatgtgaaatgggctcccaaagtccattcctatactagggataagtactgatctactacaagaggccccatatatttccgaggcctcctcactgacacccacattcatggagtctggatcagttccatgctgttttcccagtgatcagtctggggaccaagagctccccgatgttcaggtcagctgtttctgtgggtttaccagcctagtcttgtccacattagttcagtgtttggtgtggatatctgcttctactagccttcatccagcagcagatggtttttcttgttcttgtgaatgaaagattgtttcatggatcttccatagaactggcctggtggtcgtggtttttaatgaaggaaagcagttctttattaaccatgacagagagtttcctggggaatagtagacatatagcagtttttaggcttttattatgaaattcttatctttctatgccattgattcatagacttgttcttttcatagtgtcccataggtaatgaacgttttggtcccttattattaatttatctttatcattgaatggcccaattcctttaccttgtcattgaggcctggtggtctgtcttctccattctgttggtgagggtaataataataatgatgatgatgatgaagatgatgaaagcatagaaccagaggagatgggtcttaggagattctgtgtgggcacagataagctcaaatacatgtatgaatatttttgaagaagaaatattaaaaatgttatttttttaaagattttatttattatgtatacaacattctgcttccatgtatatctacacaccagaagagggcaccagatctcattacagatgattgtgagccaccatgtggttgctgggaattgaactcaggacctctggaagagcagccagtgctcttaacctctgagccatctctccagctctaaaaatgttattttaaaagaagaaatgcaatcagataacctcaaacagttccacctctagaaaggctaagacgcagagatctggcaaaccaggccagtctgtgttttttcggaaagccaatcaaaagcaaaattaaaaaggaaagatgagaggaaaaaagagaggagagacaaagataaaaagcaaatattgaatttatccagagtactcagatttttatttttcaaaagaaatctagagctttgtggacactcttccaattttaaaaagttagcagaattatcagtgggtgagatttcttttaataaaaatgtttttagacaaggttctactatgagcccaagctggccagcctctagaactcacagagatcccctgcctctgcctcctgggtgctgagattaaaaacatgcaccaccgtgttaggcaaggaaatgatttttgtgtgtgtttgagggatttgtttttggcaaaaacctgtttttaagacatgatgtctcatgtctggaactgcaatctaaccttggactcatcctgcctcagcattctgagtgctagggttgtaggtatgtttaatcctaactgtcactgggtgagaaatttttaatgctttgagggccaattccaactcacccaaggcatgaacatcggtcctcgagtcggcactttaacctggaacctagttcaatcctttgactttacagatgagttgccagactcagggaagttaatgacattatcataaaaatctgtttttctttctttctttttttgtcacttagacaatagctacaaaatgtaagaatacatccgacaaacatggagacaacgactgttaactggaaccaatggaggatggaaaaggattgccacgcaactaggccatcatttgaaagtatgagatttacacaaatgatgagtgcacagtggtaccgaatgtggaaaatgataattatcgcagaaggaccaatgggaaaacaaaagctatgctacagggtctgggtcttaagcaggtgctatgatggctctgtcaaacatgcataactatttaacatgacagtcaactggaaaacagctatcagatgacgttgcaagaagttctgggcaggccagaaattctattatttcataaatctaataaaagaagtgcatatgaattctactattaaattaagaaaaacagtgcaatgtcccatagaaaatttgataaatacgtagacgtgaatgagcagatgaagaagtgaattccatgggtggctgcaaatttgagaggtattcaaatgcatttgatggtggtctcatggagctagggactgaagattgtttggtaatgctgaagcaagtgatatttccttgaatcttctttactaatgattattacagggctaattcttgtgtcaagctaacagtgcagtgggaaagccatatgcagactttagctaagtcttggttcctccgcatttcactggcttttgatttttttcaaatggagttaatgtacagcctgtgtactagcatattttcagattccttcctggcttcagaaagctctcaataactgtgtagttgggttggctgaaactgaaaagtccaatgcaattgaaagggacacgaaagctagtttttatcatctacccactgctgtccgccctagtctgatagccttcccttctctacttcagtacgccctgtgctgtagttagagagtagcgagatctgactcagcctcactagtgtagacctcttgcaggtaatgctgaagaggaggatataatttcctttagtatccattgatttgtaatggacacagattcctgtaaagaaagaaaattagcaggcaagaaagaaaacaagccaggtgtagtggagtggtgcatacctgtaattctattcaggagttcaaaatcattctgaactctgagtagtaagagggtcagttttataaacatgtacagtgaacataagataggaataaagcaattaaaggtggtggtgtagttagggtcctggattaagtcactgtttgatggagaacataatattttaaagaaggaataggaaaaattaaaaagtgccctaggctctagaggcaggactgtgaaacaaaagacatttgctctgggatgcagctggtgctgctgtctcttagctgatgagtgagccttgggaagcactttcactcaacattcaggtatgagcagagctctctatctagcctttgtgacatgtcttacttcttgatgggcagtgtgtttccttgcactttgattgtcttcatctccctctttatattggagggagaaatattttgatttcttttctaactcccaaattgattgttagaatatttaaggcccaaagtctgtattttgattcgcatcaaataatgcttacataaaaccacaataattactagcatttgctttaaaatcagttggcattcttccacagaattaaaatccttctttctggctgtggtattttccctcttagagaagaacattagtatatctttaccaaaagaggcaaagcaaactcttatcaccatagaaacatctcaacagcactgagatccatctctactggattagaagagcaacgggctcacacaaattagttccccagtcactaactgtagcccaagaatatcatttaattctagaatgcataaacttagttaccatgctgaaaaagaagtttctaacttgtctcttacagggccttcaacactgagaagtttggattctttcaatcactcatctaatcattgagtgtataatgtctgccaagtatcatcctagattctgggaacacaatggtcaccatgagggacaccattcctgttctccttgaggttttagttgcaggtgtgtccagctagggttttgctgctcttatgcccatcaggatagatgtgaatgctgccaagcacaaaaatcataaacttactttaaatgtcatggtttttgtgatttaaacattttaatttttatattattttgtatacatgtgtctctgtgtgtgaatgatatgtgtgtggagaagccctcagaggccagaagagagcattggatagcctggagcaggtgcttgtaagctgtccaatgtgggtactagaaacataactcttatcgctaaccactgagcaatctttccaaccaggtgatgtttttgataagcccatactatggtttttgtatgtgaattttgtagacgataacttcctgtcataatgtcaaaaggatggacatgtctggaggtaaagaacaggaaaaaaatttctaggacaagccaagcctgatacgtttgatctcaggaacgcacataatggaagatgagaaccaacactcaaatgtcctctgactgctacacacagaacatgacacccatacatagcccccacccaaatgagtaaatattttcctttcagttccattgtgattgacattgtgaaggaaataaaaaggagaggaatggagcaaagaaggctgagcataaatgaatggatttgataatcccctgggaaggtgacagttgtagtgaggcttttataacaaagctaaagagcttcgtaggcagatggagaaaccatttctgtcccctgcgctactgacctgctgcttaatgaaaggccgtgtagcaagacaaatatcctggagtctgtgaagtgtggacagccaacctgtggtatagcagtacaggagagtgcagactgtcactgtgcactgggaagcataggagtattcaactttgtcatcccaggtgggcaatgccatccaagttgagctttgagaacaccgtacaaagaatggacagcagagactaggtacagaagcaagcagatccggtaggaagtgattgcagtgcaggggaagaggacatggcaagcaaatgggggtggggtgggcaacagaactaactgaaaagaaggctgattttgagaattactttggggagataattggcctgactgacccatgggttgatatgggaagtcaatgatgcctcttaaatagagggtatggaagaggggaagctgggtccctatgtatccgggccccctcttcctttccaaaagcccgtgtctccctgaaaaattcctaggcctcagctccaaattgtgtcgtgctaagcgagtcactgggaaagtctttcctgatgtaacaatcttggagtggagcattgggtcagactggccaccatggctgtgcttggtgtgaactgagaaggaactgagaacaaagtagcatatttttatgtggttcttcatcagttatgtatgaatgaaaccaaaatatgaacaatagttattatttatattggtagaaattctctgagtggttatttcatgtatttacataatattatttaaagccataagaattaattaacgtacataaatttgtatgtctgtggaaggaagccagcatgataaaatacagtaattttatgttttaaaaccatgaaaattaaataataataatgatgataacagcaacaataatatcaacaacaacctgattgtatcatttggttaacacttaaggtgtacttatatagaggcttggagagatggctcactgggtaagagcatttattgcccttccagagtttagttcccagcacccacatctggctgcagctcagaactacctgttaactctatttccaggggacccaacaccctctcctggtttctgtggacactcgcatatacttacccagtcaaccacacacgaatgtaaacaaaacgaaagtaaatatatctttatttaaaagatgtgctaatagtacagaagctagcaggagatttggctattgttcatttaactggatattgggcattgattccagggttttatattcaatactaccgagctacagccccagcattgggagactttgttttcttcaactggtactctctaattttatcaaatgaagaaagggtaattaattcattacgttcaccacagggagtccagaagggttaattagtcctggacgatgatggctgtgtctatttgccaaacaggtccaatcagtctccactgtgtttctttcgtgagtagtcctgtgggaaccatcccaagacttaggaaaggcatctggcattgctgtgtgcaggtcttgctcattatcatttagtcttctcatgaaagaggatgcttcctgtctgccagtgcatggctttcccttctctacgtggttgccacactatgggactcacatggctctgactccatcctacttagctgtcagcgccacacttttcatatctccaccactagacattgttggcattcccgaagggccagtctttccccactgctttggcttcatctcacctctcagacactgagatttttcaaccataccggaaatctggactttatgccctggcccctgacctgaattttcaactgcaaactggatgctttactcctaccgcaagctccacatgtccaatattaaacagttcacaggctgttaatgatcaatgtgcttcacctgcctcttccactgtttctattccatcactttgttctattgattttctctgttctcatcaaatgactgatttactcgatccccaatataccaggcacttttccactccaagtaccatcaccctacttctaccgacaaagacagttttcttgactatgttattgaaatatttcaataagccagcccccatctgtagcatgaaaaacaaaatgacccagaggcagacattggggttcaaacttcaagcaaagcagcaggccactagctctcaccctacctcaggctgaatggactgatgctgctgtctctcctcagcgagggtggagaatcctgagactgaatgtcttcctatcctctatgtggctggagaatgactactgaagaccctgctcctatcttttatacccctttagtgctggattaaaggcatgtgatgccaggtgctgagatcatctttgtgtgagctatttctatttaggactggatcggtcttgtgtagatttgggtggccttagattcacagagatgtgtacccccacctcctggcttctggctgctgggattaaagatgtgtatcaccactgcctgatctctatagcttgaggctgactttgctttctgaatcatcaggcaagctttaataaatcataaataatatcaccacgccatcttagtagcttcattcccattctcatgttacttcttggaattctcctatcaagggttgatttactttaccaaaattatcaactatctgttcttttgaaacaaaatgatcacattcccctttttatttgaagtttttttaaaaaatattttattatttagcttctctgacttatctggcagttgatgtttccaactagatgataaattctcttaagataggagccatgcctttaaacaccattgtactgtgtgcaggcgctgagcagactagatgctctggaatactggctggcttgttagctctctcttcacccagtggtaggaatgaagcaccaaatggtgtgtagtttagtttgtaagttcacacacatttaattggctcattagagacaagtaatttatcttttcttctaatgtatctctcacaagatattttattttcctgtagagtaattgagaagaatataagagcatgagagaaacattgaaagaggattggtaagatagctcaatgagtaaggcccttgctttcaaccttgacaacctaagttcaatcctagtactcactcagtgaaaggagagactgacttacataagatgttctgtgacctctatatctgagtcttgacatgccttcaaacaagtaagtataacaaaattgaaaaagaaacattagtgaaaaacttctgaaagatgtatttgcaaaatttttttcttaatcctatagtaaggtgttatagtaagctattaaatcctatatttaatagctggagcttgtgtgatttatgttttccatgtcttggttgactagtgttgaacaacaaacagccatatcttagtagttacttattttggacatgagtaggagttggctgagcaattctgttggtctgttaggatcttgatggactcattcatgtacctgctgtctgctacagaatagctatgctgttcttggctggactcactcagtgtctgggccatggaatgaacaacctgactgactcaagctggcccatgtgaaccctaatagtccaattcgccaagcccactgccatttctcttctctatttgctaaaacaatcacaagatcggtatatgtttggaaataggtaccaactcttgttgggaagaactgcaaagtcatactgcaaagggtgaaggagcagagatagtgggggagaatctagctgtctttgcaatcgatgactccagagctagacatttttcacagaccagcactttttatcagccacacaatgtggtattcgttctttaatcacctgaagttatttttcatccattgataaacaggtatggtaaaaattgaataaagtaacatgtacacaaagcatggggcgtcacaggaagaagatattaatattaatgcttatatttgataatatttataaataccccacaactctccctttaaagggttttttgtcttcctttaagactggttggacagagaactcccatgatgcacctacctctgctcccccaacactatagtcacaggcatatgaagccatacctggtttttatatgggtgctagggacttgaaagcagcttcccaggcttacacagcaagctctcttacctcccgcatcattgctccaaaccttctaccttattttctcagacaggctctgtcatggaatgtggaactcgctgtgtcaggcagactctggctgacaagcagcccctaggatctttctgcctctacaccacatctccctcgatccacacgggggtgacagaggcagcaccctgcttgtatgtaatgaggatctgaactcgggtcttcctgtgtgcatagcaagcactttaaacacagagctatctccctggacccagaaattccaaatagtttactcaaaattgatttttcacaaaactcacatgagagacaatcttttttcttcaattcaaattgtaatttttctcaattttttaatttaaattagaaacaagattgttttacatgtcaatcccagttccctctccctcccctcctcccctgtcccccactaacaccctacctgtcccataccatttctgctccccagggagagtgaggccttcaatgggggtcttcagagtctgtcatatcctttgggatagggcctaggcccaccccctgtgtgtctcagctcagggaatatccctgtatgtggattgggctcccaaagtccacaactatgctagggataagtactgatctactacaagaggcccctagatttctacaagaggcctcctcattgacacccacattcatgggatctggatcagttccatactggttacccagctatcagtctggggaccaagagctcccccttcttcaggtcagctgtttctgtgggtttcacaagcctggtcttgacctaaaggggttttcttaacattaaagaaattgaataattttatttaaataaaatgtgagaaacaaaatgataatcaaaacacatgcttggagaaaagaatagatgacacattgaatgactttgagtatactaatgggaaagctaagcccaaagtcattgacactagtattgatacaaagcttgcttgtggatctagagagatcaagaaaaatagatctgaaagttcataggtcaggccttggggaattggcctcattatttccacatttgatttgtggacaatgatacagacaaacatgcttccatcccaaatccaagcatatattttggtctagaattatcatcaaaagggtttttattattgtcagagaatgccaaaactacacagaagtatccagcttggaaacatcccattttactaataaggaaataggctaggagcggacctgtcagtgctctgtacagggttgttgatattcatagtagttgcttcataagtactagttgaatggatctaccggagaagtatcaaaggtcatcagtagaagtgatacataactagcattcatttgttgcacaacccattttgtagcaattaattaaattaatactccacgagctacagagggagcccaaatggagttctccattgtgtacctccctctttgttctaggaacctcatggaagagggtgaagaattgtaggagccagaggtgtagaagataccaggagaacacagtccagaggatccactaagcaggcttcataggtgctcacagagactgaagtagcaatggcagagcctgcatgggtctgtgctaggtcctctgcaaatatgttatggttattagcttgatgtcctttgcaggactcctaatagtgggagtacggggtgtctctgactcttttgcctgttctaagggacccctttcctcctactgggctgccttgcatagccttgaaatgaggaattatggctagtcttattgaaacttgttatgccctgttcggttgatatccctgggaagcctgctcttttctgaagggaagaggaagaggaagaggaagaggaagaggagtggatggggggaggagaggtggtgtagggaaggagcggagggagggaaaactgcatgaggaatggtaaatgggacagaggagctgtttcccagcaagtatcatgtgctgatgtgttcaaaggagaaatgccgatgtttattttcagctaaaagtatttagtactggctcagttagtttggcaagtacttcacagtcctatttgtcatttaaccttcacaacagtcttagagagaagacaaattaatgatgacactaacgttctgagttgacatgttacatgcctaaggtcacccagcagacaaacagtggatctgggtcttgcactcagacctatctgatatctgtgcttggcttcttagtgcctatggctagatttggtgtggtggagacttgtggaaaaattggggtgcttatttttaatttcagcttactgttattgtttattattttactatttattttgacaatttgaaacaaaatggaaagtattacattgtgagtattaataggttggtatgttgattctaaattgctatcttactgaatatgatttactttataactgcctgtccattcctctctctaatcgttaatcatcctttttttcttcttcggatggctttcaaaggcagttgcaagcatcagcagaagttgagatttgaactgtgctgtgaagaatgctgtacgatctctacaggcaaaagggggtggagggcagtccctagacatgagcaagaatgtgggagagggagagtgcatggtgatctcatagaacaggaaggctatgacaggactgaggatgaggctcagtggttgagcatggaaggccctgggttcagagagacagagagagagagagagagagagagagagagagagagagagagagagagagcagagagagcagaggggggagagacaaagaaagacagagacagacagacagagggatagagacagagacagagacagagacagacagacagacagacagacagacagacagacagacagacagacacagagggggacacacatggaaagacagaaagagggagaagaaggaatgagagggggcacagggaaaatggtttctggaagaaaggttactggatacaagcagtgttgagaaggtcagttgtacaagctaggcagtgaggggagaaaaggaggaagacagttctagtgaccactgaataaaggggcatgagactgagaagcagagacagtagacagggaaataaaaccgctaagagaggtcctcctgttttccctgttacagagacaaaatgctctgacaaaagcaaattaaggaaaacagggtttctaacagtaatgcacaaactgacttagtggagcccattctgtatagagagatacctttctcagcctagacacagaggtgtggggggtggacaggtaggtgccttggtcctgcatcaatgagatgatggcttagtagacttcccaggggaggccttaccctctctgaggagcagatgggaaaagtaggggagcagaaggggaggagattggaaagtaaaaaataaatttaaaaaattaatttttttaaaaaacaaaaaaataaatataaaggagaaaatagggtttattatggctcatatttcctggggggacatgactgggaaggcatggcagcaggctgggaagaaatggaggccggagcaggtaggtggcactgaggataaagaggaaaccagctggcctacaaaaccctaagtcccatccaccattaatccacctcttccaacaaagaccaacctcctaactattctagaatcttctcaaatagcaccaccagcccagaccaagtattccagtgagccttactgagggacatttcccattctgatcccagcaagagaatatgcgaaatgtctttaatgttgtttggattccatatttacacatatttactaatgtgtaattcggggtgacacaatttatttttccccttcaaaaatgttcatgagatactcacctataatttcagaaaaccccttacctcgatgggaatttcatagatgagtagacgtccatatgagtagactctggtcaacaactacaccagccacttcctagtcatcacctcaaggaacacgtaaagcatccagacagccgggtactgcagctcctcccagccttcctcgggcctcaggggggtatttagcagtactgaagacaattcggtcattattcataggaggatttctattggcatcttgtggccaaagaacactctacaatgcacagggcaacctgagagctatgtggaagctaaggaaaaaaaaaaaatcgcagtgataaggattttaaaatttgaagtgatggagtggggcactgcagtggaaatatctcgtgggtggtgtcaggtgacaagaactggagttcagacggaggtcaggactaggaatgccatgctgctgacagcaggtgttagccacagcaacaagaagggccctgggatgaactaagaaaggagtgcagggaagtagaaactaaattctaggaaaatgctcacaagaatagaagtgaagagttaaaaagggattgatggatacaatgaagaaaatgagatctggaaaatgctcaagggtcatgataatattttattttttaaattagttcttttttatattttaaaaaatgatttatttatttttattttatgtccactggtatgtgcctgcatatatgtctgtgtgagggtgtcagatcccctggaaccggagccagacagctgtgagctgccatgtggttgctggaaattgaatccaggtcctctggaagagcagtcagtgctcttaatcactgagccatctttccaacccatcatattattttaaaagccaggtgaataagagtttgagaagatgatattcaaatatatctttcttagagtccagagaagaatttcactgtattctctcactgattagaattccatataattgataatatacattattttattgcatgcatgtatgctatttatagttatccttagtatctttattggccttgaaagtagcatttcaattctagctaggcaaaagcttccaggttatatgcccacatccagctgtctgatagctttcactctgatgtggccactgtacatccttttctgaggcccttgctctcatttgcctctgctgaatccacacatcttgtttgaccaagcaacaggaacaaacactctttcaataatggctgcactgtaggtgtcgtgcttctcagaatctctctggagattaaatccactaagccagctgttctcaaccttcctaatgctatgaccctttaggacaattcctcatgttatggtgacccccagtcataacattctttttattgctacttcataactgtaattttgctaatgttatgaatcacaatggaaatatctgtgttttccaatggtcttaagcaacccctgtgaaaaagttgcttgaccccagaggggtcatgaccacaggctgagaaacattgcactaagctatgtacagtttgatcttagttaaaacacacacacacacttgttaattattggctaccaatggcaggacttttataaatatgctgtgtcttcaggctggagtagcacaggtagtgcttagtgctggaggagagaaggatgacggagtgttcaggtcatctgctggtcatatcagcggaagattgcttcattagtactgacgtaactacatgacgtaccctgtttcctgttaatgggaaaaattgtccagtgacacttgttaaaccattgtaaggaagaatttttttctggaacactgacaggttgaaggagcactataatagggtattatagtaaggcgaggaagagatacagtacatagctcatacagtacaagagatacagtacatattatgggcgagtcggattttataggcaagggcatagagtggaggttagacaattgaaaactagcaaggataaaggagattagagctaaaccaacctattggaatcctgctgagcattagctggagccatcagatatccctatggtgtgaaggatgaagaactggtcagatgtggagggtggtcagatgtgagggaagagagattcttgccatacagatgtggaagttcagaattggctcagaagagaatcttcaccaattacaaatgcaatatgggtaaatctttgcatgcttactgcagccaaaacattgcattgaacgattctatgtgttaccacatttaaacactcacaaggaccattgccattccacactgcctttcaaaaggtgacaggtttcagaaaagcaccatatctggtctaaccaaaccctagcctgtaagcatcactgaataagggcctgctggggtgaggggtgtgttttgttgttgcacatcctgagaaacaccaaccacatgttggtatggagtccttgaaacatgagtcacaaaacagatgagcactaaaaacaaataacacacacaaaaccgaatttcattagttccttgtctaaagtataagtgtgaacagaccacagtgtggagtgagtgctgttgaacagtgcaaatgtaggacgtttcaaccattgcagaaagctctaccttacagtgatgcctagaagagagtcgatattatcttccttccctgcttggagtctagggtcctccacacacaccttggcttttcttccaagcagatgggctttcctctccacttccagcaacttcaactcctaaacttaagagaaaggagattcctttcctctgcccaccttccctgtatcagcagcagcttcaacagcctgaaaggggagccccctacaaaatggctttccatacgaggctctgcctatgcctgctatacttatcggcacccacggctactgaacactttttactttattttattgtgaaggcgcattgagatgtcacaagggaacgccatgatatcacatgcagcattgtgatggtaccaggcagcagtgtgccagcacagtagagcatcacaatgtcatagagaagcattgtggatgtttgcagtggaacattctaactccataactgaactgtgatgctgcaagagatcaccgtgttagcacaacagagaattgccatgtgacagcggaaccttgtgatttcataatggagcactatgatgtcacaacgaagcatggtgatggcacacacagcattgtgatatcatactgaagcactgtcacgtcacggctgagcattgctgtctcataatgatggactgtgaagtcacagtggggcactgtaatgacataaaggaacattgtgatagcaaagcactgcatagtgatgttacaacacagcatcgttatggaaaaatggaatgctgtgatggtgcaatatacagcgctgtgacgtcatgggaagcattatgatgattgcactacctatttctgtcagcattttcactctagatatccatccatgattcactggctgcattactcaagtttagggtcaaatgctacttcttatgagagaccttccctgtgctcgccaccctgtaagtcttccatcctcccatcctactttctttattccagaggacttatcattctctatatgatgttatttttttcttcagtagtcctcgccctctagactagaaagagcttaatgaaatcaagagtgctgccctttggtccatggtttattctcggtgcccaggacaggcttggtgagcccaaagctttgtgtctgccaggtagccctcatcaagtgaggcacatcacagccctgcattcagaaaattattattttcatgcatttatttattttgtgtgtattttgtggaggtcggagaacaacttggggcagtcaataattctctcctttaaccgtatgtgtcccaggaattaactcagcttcatctgctgtctctatggttctttctttgtcttttcaaggacagaggtcttgttatggagtccaggttgtactcaaactcaccatccattacatgccttagcctccagattgctgaaattgttggcatgtaccattacacccccaattacaaaaccctcaaaggttaaaaattccctctgccagagagcagtcaggcaaacaaaatctgaataccatcaaggataaaacaacagagacatagctcttaaaccaataaataaaatagctctgggctttgttagaggccctgtgagctgtaacttagaaagaagcccgaagatttgttctattctccaaagcttttcaaaggaaccggttgtcctatgttatttaaatggaagataagactgatttgccactggaaacagtgtttaactggaagaagtagttttttcaaagacagggtttccaagcctttgacctaaggactttcatagctgagggttcaggctcattgctgcccctgcatttataagctcattttcaatgctaatgaagtctctttcttgtgtgtgttttaaacacacatttactaatccctcagatctagagtttcatgcaagtgaaaatagtccttaaattccgatttatagttacagtgtaggacagtcagcagaaagggaaactaacatacaacacaaagggcaagatgagaagggtctttaatctgctgggttttgtggaacgctagggatggagcacagagcttcagaaataccagtcagacactctaggatggagccacaccctcaccctcctggcttgtttttaaaatgccagagcacctctgaaatcctagtacgggggccctgaaggtgggaggactgagcgttcaaggccagcctggaccacatggtacctcctattcaaaacacaaaacaaaacaaaaaacaacaaaaagccttagaaccttgcccaaacagcaacaaaaacaaagcggaatattgcctgctattgaccagtgacttcctgttatcctcaatttttctgaaaccttaatttcttttcatactttcaacagacccactagggatttttgttgaaaagaaaacaaatttaggggtttgcatatctaaccagttcctagctcgtgtcactccaagggtcactgtgaatagcaggaatatgtgaccttgtcagttcagagaccctgttttggcctagaatttctaactggatgactagctaggaacctgccacacacaatatctcctggtgggcaggagcgttccctgttcaggttttaccctgttctgttattccacctggcacctacacctcatcctctcagcaagagagtgaagcaaacatttttttttttttaattttaattttacagatgaaactgcaactcagagttaagttgatcacccaaagtcatggcctttgccagcgagttgaactccggtccttaggacgcttgtaattaactgactgatcagtgaaaaggtctgacctgctcgctggcagggtccccttccctgccagatgcagaggcagactttgtataccttctgccctttgaccctgcagggaaacgatctttttgagaacacacagcctcctgctttactgcaggtccgaagcaccctaggccattaggagagagccctgtagtctaaggcaagccggctcgcttctcacccggatcattacataacctggaggcgcccctcctccccgcgcccctcatgcgtggccgagcccccagcgcagagcgaatcccgggacaatgcttcttccccgactgggcagagtcaccctcagggctggcgtggctgaaggccttgcttcttgggggcggggcggtgggatcactccagtgacactgtccggccggagctgcccgcggctccggcccctgcggcgcctccgcccagtgcgctctccgcccctcggccgccaccagacgcccgggaccgggtatagggctgtcgcgcagggggtatgtgggcgagccaccgccagcactgcagctgtccccacgaggtgaggacccgcgggccccgggatgcgggcgggcgggctgggacccggtagagagctgcggagcgcgcgcctagtcccgacgctgtcccggtgcggaaagctctgcttctgttcttcccgctttctgattcggtaggacaggtggcaccagcgtccaggtagggcggcagggttggacctagacctcgggaaggaccccgggcaccccattctatgtctgtcccagctgcgcgctgtgtctagaccctaagtctggccacctgttgggtttagaaaggaagcacgtgcccacttgtctgtcctgtgtcctggggtgtcccgctgagtttctgggcaggtggctggagagagtgagtagctttgatctgtgtcctgcggtttccaggtgcacatttcccatacaagagagaccgcctttcccccttgattgtcagttttcttactttttgtggtttgtgagtggtctactcaaaacaccagccttccgtatttgccatgaattaaacttaatttctccagtcattccttgccccagagcagaggttctcaacctgtggatctcagaatcactgatctagtgcaaactggtgattcagcattctgaaacaacccgcttgcattttgtgtggcctcttgttagttcttcccagatttgctgagagctgtgtgggcattccagcggccctgctgccctagtccagaagggaaaaaaaaaacaaaaaacaaaaaacaaaaaacaaaacaaaacaaaaaaaaacttcagactcgccaagtgcaggaagaccctgtggctacatatatctgggctctctcgcttttgaaatctgcagctcctggctgtgcaattcgacttaccttcaaagttacactatcctagagcttatggtgtcctagccactcatgatgcccagcctatgactgaaaagtatgaacgctggatcgcttattgcttacatgatcatagaattggaaaggagttttagagaatctactagattcagattgttcaacagtttgggaagctcagatccatgtctgcaccgattgggaaaatacataccttcaagtgtgtagatgggaccaacattgacattcagcttttgtcactctcccccaggtcagttttcagggcactttgcctctaggtattttaacaacaacccccacccccatgacaagaatgacccaagcttataattttcctattgttgcttttcactcatctgtttttaaactgtgagggttctgaaatagatgagagtttaatttagtcaaactgcctttgttgtataattgttaacagtaggaatccttaagcctgctatgatggaacatgctgtaattccagcacaccagagatacagacagaggattgttgggagttcaaagtcagcctgaactacatagtgactattaggtgagcaaaggctacataggaagaacctgtttagaaaacaaaaacaaacaaacaaaaaacccaaaaaacaaaaaaactaaggatacaaactgaggaaaaaagagggaaaacaggaagcaaggaagtattcttaattttaagtaatatttaaattcttcccacatcaagatgaatgtattgatacttgtcagatgcattcccagaaggagcaatcaagataagtaggagtaagctttcagcactgcttcttgcgctctcgattctgtgctccctctggggatagtggctagtgatgaggacatgatgtgagagatttgcaatgctgagatgtttctagaaatgtggcccagaggtttgtcatgagcaatccaatgatctggaacagaagtcatggcttaaattttaaaattgtggaccgacttagctaataccattgcagtgtattgcatatttttcagtttagttcaatgtaatgcgtatttattgagtgccaaacgtatgctcagtgctgttctgggcatttggtgggtgtcagtgaccaaaccaaaggactttggctctgaagaactcaacttgaaattcatttatcaaaaatttccctggcatttttgttagccaggtagaagagaatttcagttttatgttcagaagggaagcaaatacaagtgttctatctgtcttcttagccaatcatcttgttgatcttataatcacgggaaacagaattcttgaagtggctttgatgtttatgaactgactttggctacacagtcacatgacttattggtaaacctgttaccatggtagtttttctctttgaattacacacattcctgcttaaggaattctctaattctctcagttgcattttcttcgaactgcacagtttgcaagctcaggcatgtttgttgtttttaataatgacttatctaaatgaacttggcaggtctttggtcatataccaccacccccccaaaaaagtgttcattgcagtgtttgagggtttttttttattcttcacttaatcatttgattttcttttacaagttgtcaaactagaggctattttcttgagagtgagtacttttcatgcctatttaaaaagtcacccattgcttcgctataatttaattgagaaaagccaaatcacagttgaaaatgttggaggatgtgagcacaaaaaaagattctgtgttctagtgtgtgtgtgtgttctatgtttgtacaggtgagctcgcccatgcagctgtgagtggagaccagagattgataacagaatgtcttcctcattctctactttattgattgattgattgattgattgattgatttacttgagggagggtttctcatataactcagagcttgccatttaggctagaccagctggccaccaaaccctgggctgtctgtctctactccccatcactctggttacagacaggtgttgccacattctgcttttatgtagtgctggagattccaactccagagcctcatgtttaagtggtaagaaattcccactgagccctctcccctaaccccttgtttctatttttaattttatcgacatcaaaggatatcaggaattctcattatctaatagtgtactatttaaaagtggttttatgaaatacttaggtaaagtcacaatatctgatgttttgagacttactagctcctccctccttccttctttccttccttcttttctttctttctttctttctttctttctttatttctttctttctttctttcttgacagggtttcactacttagccctggctagcctggagcttactatgtagatcaggctagcctcaaacttacagagatttgccttcccctgactttcaagtgtagggattaaaggtttgtgccaccatgcctggctggtttctttatttacttacatttttctccatcaaagatggtccaggggagtgagttgttatagtcagatagaatgtggctgtcactaattattctataaacacacttatttgttggtttaatagatatttattggactatttagtgacaatttgtgtaaaaatttgtattttcctggtggcaggatgggctgtaaagacagattatacaactgaaggctgaaatgccttgctgcctgtacttgggaatgtaaatggaggagagtttgtgcttgggactgtaaaggagggggggactgtgcttgggaatgtaaagtaggagagagtgtgtgggttttgagaagttaaaagttggggaagactttatagtggacatgtctgggctgctctttgaaagatgaatagcatggtaaagttttgtttcctttttcttttgtagtgctgggaattgaaccccaagtgctgtctgctgtgcagcactctaagactgaactacctttagtcctacttgtttcttctacttaaaaaaatgatttgagaatttaatacattcaaatttgattatattcacctctttcccaacttctcccagatctaccccattccatatccccagatctctctctctctctctctctctctctctctctctctctctctctcagatagaaataggtagatagagtctaatttgtgctgtttatatagtcttgagtatgcaaccacccactgtagttgtagatagtcaacccacctggggtcatatccttaaagaaaaccaactctctctcttttcttgccaattatcaattagcaatagatccccaagtaagggtggtatttcatatccacacctccccttcaagttggaattttgttagttcgatcttatgcagtactcatccccaaatgggatatctataatgtagcccttctccaaaggctcagggagcatctcagaagaggcagaagagggagcagaaagaatgtaggagtcaaaggtggtggataaccacaatgaatcagtgttttccagacatagcagggagttgcatatatggtgttgtaacaacatgcataagaccacttgttgtttttgtttttgtttttttgtgacaaggttttactatgtagcctggactggcctgggattttctatgtagacaaggctggccttgaactcacagaaatccacctgaaatgctagaattaagggtgtttgtcaccagacttggcccacttcatttttaaaacagacaaacacatcatttctgtatcctgttgtgtacttttttccctgtcatgggtagtggagtattgaccaacactaaatcaacttattgggttaacaatggtgttctcgattccattggaaatacaaactggttgttgctagaagcattgagattactacagaatatcactgttgtaacctggtatgttatgctctttgtagtttatgtacatgctaacagcactctttagtcttagtcctgtgtatgctagctgcatttgatactgtgattttgcaattaaattaaatatctcctgactaatgtaagtggcaaatgaagaactctttttgccacaaaataagttgactgatacatggacccatatgttactcaccttcactttattataatgtactacctgagataattaactcacaaagagaaaggtttagctcgtgttacaagttttatagattatagtccaagatggaatagaaccactaatgtgtgtcttagtgtgggcatgcatggtagtcaactgaaaatacatggtaagaaaactcttcacattatagaaaccaaaataaaggatgggtaggatgtcactatactcctcaaaacacttctccagtaacctaaagatatcctataggatccaacttctcaatggttctaccaccttccattactttagagatcaaacttttaactcctagacctctgttcagtttataacagtccaagaaagttaagcatattgaaaaaaaatcagtacatgatccatgaaaacactagacaaaagaagcaagatgcaaaaactacacagtgtaagactccacatgttcagagaagcaaaatcatggagaaaaaaaaaatagattagtggtagccaggagatggaggtggagagaactgagagactagtgatggtgctggtttcttgagatgatgccttgggtctgaatttatataatgaagctgctttgcacagattatgatgatactaaagccaacacttgaaaatggctaagttggagcctggcatgcggcttaatggaacatttgcttggcatgcctaaggcccaatccttgataagaaaaagaaaatcaaaatgatctagttggtggagaatctgctatgttgattctatcccaatttaaaaagaaaaagacccaggagatagtttggttggtaaagcacttggtttgcaaacatgtgttgtaacacaaatcccaatcaccagtaaaaaactctgggtgtggtagtgtgcacctataatccaagtgctgggaaggaaaagacaggagggcccctggggctcactgagcagccagtctctacacttggtgagttttagactagtgagagaccctgcctaaaggaaatgtcaatggtacctgaggaatggcaccttaaagttgtcttcctgcctccacatccccacacacatgtacctgcacatacatgaacgcacatgcacaataaaagatcctaaagcttaaaaaggcaacatgaaaaattacaacttatacatagagtggtcagctataaaatattaagaaatatagtaaaaatatctaggattttacactcagctactttcttttacaagtttctttaaggtcctactctgctttgaaaagaaatagagccataacatgtgtatgtgtgtggtttagccaagaaacacaacacagagcaccaatcatgactccatttccaaaggctggggaattaattcatatttactcatataaaagttgaacaagatgctgaaaatgtatcccatccacccttctgttcttgtagcttctggttgctttagtggacagcttctgaagtttcagattatgagttttctcagtatattctgagaatagctcatgttttggcatcagcatgaggctttcctgtttattggcctcttatggatacagaattgtgcacttgagattatatgggagacctgacacaatcttcagacttctaaatcaccataaaagtcagtgtgtttctctccaaaccctggctgctgaccccctgatttgagtgtgtacacagaacagcaatttaactacacaaactacaccattttaactacacaaacccttaaaacctactaccccaaatcctcacactgagactcttcaatacatttttgggagccgctcaccgtttgatggattatttgacatattacaaaaccaagaatgcaactacttatttcgggaacaactagtattgttttagcaactctgcttcacttgatgaaatactttccatggaaatgagatcatatttatctattgaaaccatctgtctttcttgaattggtgattgcagctccctaaatctggaacttccagacagtctcattgtggcacacggaggaacccaccaagatgtgtaaacttgctctcacaataatcgaagaaagagaacttccggtagacagcgatcaagcctagtcttaactgtcatcattcagttcttacaaatgggaaattcaaattcacaggcttagcctatatcagagtggcttgttcttgttgactctcagcacctttgtatccatgtgtgttgactcaagtcttcacagcagtggttctcagtgctgtttgcacattaaagtcacccagactaaaatatgaatgtcccttccctaaaatctttccattaagtaggtctgaggtaaggtaggggcatcaggagtttatgaaaatcctgtgaaaggattgtgcagccaggattgagggtcgctgatctatatatttagtaatcttacacttgttcagaaaaagaatattgaaacaaatagatgctacatcattttctaaatgtgtcttttggggtatcttttaaatatgtgtgataagaattaaatatttttctctaaaaattccttttcactacacagtgcctgttcagtatgtgggaagccttgcttggtggtggaaaggattttcctccactgtggaattcattaagcttagttttatataagagcagaactacaaatgaactatcccagtccactcttctgttgctataaaatgaccgaagctggatactttgtaaagaaaagggtttattcagttgacagtttcggagcttggaagtccaagaccaggaaacattatctgtttggcctctggtagggtctgcctggctgtgtcgaatcatcatggatggtatcattgtgggagtacacacaagagggaggggttacgtagagatacaggaaggaagctggggaatgattgaggtggcaggctggaccactctccaggagctaactcacttcccaagaccagcatcaatcccttctaaggctctcgatgacctagatacctcccattagtggtcctgccccctcttaatactgtcacagtgaggccccatgaactttgggggcaggggcaatcttcagcacccaccaaacagtataatcataatttgctaactaattaattggccagccttcttttacatggttttggtaattgttgttttcacacaggtataaatttgagactaatgatttgtactttgtaataattgtttcttctaaacaacctttaaaatacttctccttcccttcccccttttctacctagttttgatataaaactaagattggctgagcttagtttgcctgccaagtcactgtgtagtccagactagccttgatcttgtgacttctgcctccatttccttagtgctaggataacaggtatgtaccaccatggctgactttttgctgtatgtttctttaattgagttataaaccttattggtcaaacttatttctgcaaatcttctcttttatttggctatgtcaaaataggttttcaaaatgtaggacttttatataagaaagatatattgggttcttataagagaaagacagtttaaatattgtccttcgtgactaccaaggtttcattaattttaggttgtacttgtccttggggctgactgtctttgagaaacatgctgaagaaattattagcatagaacctggaaaacaaacaaacaaacacaaacttttcaatcaaactactcataacctaaccttggggctggggatgtgattcaatggcatagtgtttgcctagcatgtgaggcccagggtttgattcctgatgccaacaaacaaaacaaatgaatagaacaaccaagaagagctgttattgttgttttttaacggaaaggtaacgtacatcttggggctggtgagatggcttagcaggtaaaagcacttgcagccaggcctggtgatctgagcttgctccttggaaccacatggtagaagcagagaatcgactcctgaaggttgtcctctgatgatttccatgtgtgctccacggtacacatgtgctcccacatatacacagtgaataaataaagcataaaaagtaatatctccatggatcttgactggcggtttttgaacagtctcttgccgatttctgggaactggcaggagccctagggcctgggtaggtaggggtgtaatctggcttccagtcttaggcttctttctgggaaccccttacagcctgagaaggggagctattcccacttttacacactgagtttccgagtaagatgtttcttgaacaaggaacctctcagctaaaacaggttttcagcaactgagccacgtatctaagtttgtatccaatttggtttgggttcctacaggctctgcttctaagtgctaatgggtaactgtgttgagaagcattggggaaactttagtattagtgactataaaatggaagagaaagccagtggtcagttggatattcaagacaataagcatatatttggaataattaagtataaaggttctgtgcaagataaatatcttatgagagagtgtttatagagacaaatggaatagttcaaatataaaattctgggtgatagctaggttaaactgggcacccttctctttcctcatgctaacttcatgaaaacgtttgggcaatgaagttcacttctgattatgagttttgagacaagattaacaagttttctgaaacatgatagataataggttttctccaccaatgtagtaagctagaccaaacccaattgaaaagtaaaagaaggggtttatttgagcaaagcaattcctaggtgaggtctccagtcccagagattgaggcaggagaagtcacttgcccaaactataaagcagggagcttatatagcctgtaggtgtgtgtgtggggggggtatgtgtctgtcacaagctggatttatgctcaagtatggtcaaaagctgaacgctgaatgctttaggcgggacttgggtggctggcaacttcaggggaggaagctgcaaaactgggcttttgggtgccttccatttgttggagattctctgagagggcacagtttggaggggagagagagggggaggtggaagagagagagagagagagagagagagagagagagagagagagagagaggagaatgagtcttccaggttaagcagggatgagctagaggttccagccaaccaaagatcttattctgtaacccagaatgccctagaactgtcatcctcaaactgtggcagtcctcatggttcaacctcctcagtacaaggattagaagcataagtcaccacactcaactcactttttaatcttttattttcccacatacatatgtgtataaagagttggatcatgtatgctaatgcatgtgtagatgaacagtgttaagtctcaaaccctggaacttatgggtgagatgcccctttagcaaatcaaaactgacacggctaccagggtctcactgcatcccttggtccctaactcttacagggcccttttggctgcattctctccccttaattctctagcctaaggctgggctgtccttctgccagctgccttttcctgtataatccagccattttgtttacccggccttttgtctactttcttttggtcctcctggctgctgtagctggttcctctctttcccctccccactctcctcacaaggctcaggaccatgtccactttgtactctcccagatgtccctgcctctggttgtgctctcccctttgtccacaataaaccttctcctccaccaaaactaggaacagtcctttcctttttagcttctttctttctttctttctttctttctttctttctctttctttttttttcactcagacagtagtatgatggagtcaaaggcaagagggcaaggacatttctctgaaaagctccaaactgtgacaaaagtctctagggccccttcttaatatatattgaggtgtaaaatggtagattcagccacaggcatggacactgtggtatttcagctttcatagtaaacgatgttaagcagtagtatggtttatctgttacctccatgtcttaattttccccctttgaatggtgtctgctgtgttttgggtgtggtccaatggggtcatgggatatttccccattttctgtgtgtctgtgatttattgtgttttattgacctaaacacatctgtgctggccacctgcttaaaaggatcaccagccacctctgcattaacttaaaaacttaagaatcatgagctgggcatggtcgtatgtccctttgattttatcactcaggaggcagaagcaggaagacccaggagtttagaggccatcctggtctaaatagtaagttctaggtcagctaggtctccatagtgacaccctgtatcaaaaacagaaataagacaaaactttatgtatattttttttaaaaaagccatatcaccaaggaaaagaataaatgttatcaataagatacttgcccaaagcatcttactcagtatgtcccattgataaaggactgaccattgtgccaaaaattaagccctatacattcctttcttttctttttttgtttctttatgttggcaactctatcttctgtatttagaaaagatgaaattcagataactttagattttcattttattagacatgaagttcccactaaaatttcaagtgaaaatccaactttctgatacaatattatgacccaacttttcaaatagctgaacgagcttcactaggtagatgctcactgcctacccagcaagctctaggctctgtgctcaggctgatggcactaaggcaagcctctaccttaggacaacccaggttaagcaacctgtataactcagcagcctacagtttcctggtgtgggtgttcagggcccaaggcacttcagatagcctttgtggctcaagccattaaggacttgtagctttcagagggaaataatctagacatgaggggtatcatgtacaaaggcactgggatggaaaagcacacactgagtgaaagtacatctagttcttcccagtgatgctgtaaggcccacaggcagggctcatagctagggttctagaaaaaccaaagaacagcctggttaaggtcttgcataatcaaaccatctttcaattttgctttggtagtttctctctctctctctctctctctctctctctctctctctctctcccttcctttcctcctcttccttcccctcctcttcatcctcttcatcctcctcttcctttttttttggacagggtctctctactgtcttagaactcactatgtataacccacagaggtccacttgactctgatttctgagtgctgggattaaaggtatgtgctaccatgcccagcttctttaacagacgtagaggtgataaaattagcttatggttcaggcagataactctgagagagggttttagggaagcccaacggggcaatgaactaggagtctgttgaacttgggcagagggaaaataaggttaatgattcacagtagcacttatttttgtattgatattcttggtgctcagtgttcagcagggcatgtagtagagatggtaggcatttgccaaggaagccacatctcgagtaccatgtactaatactgtcgttgaaatcacatacatgattgtgattatctgggaagaacacaagagagaatggaagagaatcacaaggctgtgcccctactgcacccaggctatgtcttggccattacacattttttgttttgttttgttctttaagaagggtttctctgtgtaactgccctgacttctcctaaaactcaatatgtagatcagactgctctcaaactcacagagatctgcctgcctctgccttctgagtcctgggattaaaggcgtgtgtcaccactgcccagggtactttttttttttttagatactgtctagccatatgttgacccttttccactgagctaaatgtgagggcaaggactgtgtcttaattatagtgtcactgtagtagaactttggaggacactctttgtatatgtgtgccgtgtctatgtaaggaagagtgtcctcttgagaatttcagtggttcctgcttaaccagctttattgcctgtcttggtacctgctatgacttgagtatggcttgtccccaaagacgatgctgaaatcattcctgttatgagatatagaggggtgaaccacatgggatatccaagaggtaattagatctctgccatcatgaagtgattaatctatcatgtaattaatagattgatggaagagtgggttgtctctagagtgggtctgttataaaatccagtttggctaggtcacttaccatattctgtctttaccaaatgatggcctaaactacttcaggactctgtcatcaaggaaaccatcaccaaatgcagctccttgaccttgtaccatagctgtgaactaaaccagacttcctttctttataactctcctagtctgtgggagtgtgttatagcaaaagaaaacagacttgttccttgacttgcggttagatgttgaatttttctgttgaataagtaatataacatagcatgagtggccccaagaagagaatttagcacaggaaaagaagaggtggggctctgtaggtggaaggttaagtaggagagacttctgtcgtggatttcaggaaagcagtttcaataatgagagatgagtgcagcgctacagaaatgtcagctagtgaagaaaaacagattgacccagcagacataagaggtcatgggggtaaagccataaacagcctgggtgacacttaggggaggcaggaggcaaatgctgttccacagaggtgggagggagaaaaggtggggagaagctgtgcacagctacaaaagaggctagactccatccagaagggaagaggctaactgatggtagccagagaggaggatgaggctgcagggagcactctgtcctctccatcctcatatcctttcttctgcctgtaagacgacagactcctaagggaacttgcagcctaatgaattccaggaaaatgtccgagctcaaaacaaagaaaaacgagataaaatatcaaaaggcaaatctttctttgtgacatgaagataagagggtgcccatggatcccaatgagccacagaagaggaaatggaggaaaatgccacaggcctcaactcttctacctcatagtaataacatgctttggacactttctgtactccaagccttgttgaatcattttacatatataactcattaaactgtcacgacatccctgtgaagagggaatcatcttaactttgaattaaagccagtggcacacagagaggttcagctacctgtctgagagtgtaagcagcagattcagaacacagaactccggacatgctgctgtctatcctgctgaaacggaatgcacttaggacttcaaacaagaacatctaagaaaatgctgcagtgtggttgcagagtccaggacactcgatgattgctttctgctctaactcataatctgaaagtcgggaaaatttttggtagccaaacttgccttaccagttacagggaaagaaaggttgcaaatcttttattgacggcaaaccaaggggttgtcactttgggggtgtgtgtgtcagggttaaccttgattgttggcttgttggaattcagaatcaccagaggaaaaataaatatctgggtgtgtctgtgagaaattatctatagtaggatcattaagtttggaaaccccacactcagtggagtcctgaactgaattaaaaggggaagtgatgtaagcacagctagtcatgggtctccgtttcctgaccgaggatgcattgttgcaagctgcctttccttgctgggcctttcctgccatggtgaactgcatattatgggagcataagccaaaacaaatctgtccttcgttaatttgttttgtaaggtattttgtcacaacagtgggacaaacaactaaagcaaggtgacagcaagagcaacaggagtggcccatgctgaagtctagcctctaaggagaagaaagagagaacagggccagctaataggcatgggagggagaagagcagtaagcaagggcgttatgaactgagggaaagttgcaacccaagcacagtgggaattacacagcttgagagctgaggagaaaagacggtttgagacagatgcagtcccagatttcaggagggttggcgaatctgacaatgggctgacagtatgggtggagatgggctgcaggtaagtcttgtgagacacagttaagctgtgacctcaggggtatagcatgggtgataagtagtccctctgtcatagggacattgttcttggtagacctcagggctggctttaagaatgctgcaatttagtcatggatagctagcaggaaagatatacagattagctagcctctctttgaagaacagttgagtagcttgcgtcttggactctagtctttggagaacacctggaagtactgaattggccacacaacatatttcacaggtaacttggggtgctttagccaaacattattgctctaaaaggggactgtgttctgatgaagtctcctatctcttcctccttcccaatgtttttctttcttctgaaaatgttcatcatgacactcccttggtagagaggcagctgaagacccgttcagcctccagctgtggagctgttatgacatgtggaggcaggggtcatgggagaagggccagaagcttcaatgtcacacagtgtgctgtcctctgcttctatagttagccgtgtggtgggaaatcagcagtatgcgttccatctgtgcagctggacataccatggtctccctttctgcccaaatgggtttctgagagttaggtttgagctgagggtgcacagccccacatgggaagcagtggagctgacatgtaggtacaaaccgtgacaccaagtgacatgaacagaaaatttgtcagatggaatgtttggggatgcaagcagcagaaacctgggcttggtctggcttccatttcctcacgtgtttggaaacacaggagaaggtctgggcctgtcattatcaaggtcttctgcagaacatactgatttcattctttcatgtatcagaggtgcccacaacagtgtgaagacaggatattcctagtgcacgcagagatagtccgtgacttcatgactcctcagtcgaggaaaagcctttcatggaagcttccagaaattgggtcactattcttcgagagcccatacctgtagaatactcaagagtccataactttttccctttctgattcaggctcttgataagtagcccaggctctctgtgaactcatgatcatccttccttggcctctcaagtgctggatctaaaggtatgtgccattcctggctagcgtaattcttgattagccattttgaatggctatagtgccttagagcccatgacagggagaagcccacagacatgagcatgaagctcaatcagccttgtgtatgtgtgtctgtgtgtgtgtgtgtgtgtatgagtgtggttatgtcttgtgtgttcttgtgtacgagtgtgtatgtgtgttttgtgtatgtatgtgtatatatgtattagggtgtgtctatgtatatttgtgtgtgtgtgttgtatatgagtgatgtatgtatgtatatagtgagtgggtatgagtgtatgtctgcgtatatgtatgtgtgcctgtgtgtgtatcagtgtgaatacttttaaagcatttgaagcttttcttggcattgtttctttaatttccttaaatatgaactttttcatttttttatgcttttggtgtagaagagaaatttacaaatgtttgcctgtttcttttttattatttttaattttttgagatgatagttacgttatttatcattttactcttcaatttcctttccccccaataaacacacacacacacacacacacacacacacacacacacacacacattggatacccaattggtgtgttcctctctgcagaagactgtttctccccctctcagcactccttagacgtttgtattacttggcctagggttgaaggcttgtgggtttaccccccccaatgtgtttctctttctttcaaacatcataaagaagtctctcctaagttagacttagtggcagaggagccatcagtgaggtatgaagttaggaagtaaagaactgagttgttttgttgttgcaaattgccttgctttaaataccattatgatgtaaattcagtccatatttggtttatattcataaggtagttttcccttaagaatagctagatcaatgtgctcacctttgtctcatgtctaggtgactaattggtccgtgagtgactttaaatgatgaacaccttacatttatagtgtcattgttggagtatgcattttctctttctatagtactttatattactgggatcaaaataattctagaaaatttgagttgttctgataccttctaacctaccctccatctcccttgcattttataataaaaatgttttgtgtgtgtgtgtgtgtgtgtgtgaatgagccataggctgaccgacagaggatagttttccaacataatacttttcattcattaaattataccctaaagttcaatctaagaaataggttctgctgccgtaaggcatggcaaaaaaaatgatggtggtttcttcaaggccacataattagtaactcccagggctaagattgngtgtgtgtgtgtgtgtgtgtgtgtgtgtgttttaatggctcagctattttagacttcaagaaaacacagcccatatcaaatccttcccattaatccttcaagttctaggcagaagctaaaattgtgcatcttgactcacccttcccttagtggggctctgagtctctgctcacagactccctagaggcttgcctcacagacacatctgctttccattcatcgctccggatctcacactgggacacttgctatattctgaagcaatttatgagcaatttgatgggaaacatgaagtaggagattccaagtttttgctgacacagtatgcatatgggatatttgttttggagctgtggtggctgggaaaagacttgatgtcccatacaatccttgcatcgggtcctgggatgcttcaccaactcttcctacatgtccaacccaagaaagttgatggcaatgctttgtagcaatggaaaatcagataggctctggcactattcctctgtaactctctctctctctctctctctctctctctctctctctctctctctctctctctgtgtgtgtgtgtgtgtgtgtgcgcgcgcgcgctcacacacgcgctcgtacatgtatgagcatgtttgtgtgtgtgtgcttatgcatctgaggctagagggaaacctcaactgtctttcctcgatgctctctaccttgttttttgagacagggcctttcatagcttgggaattgctggagtgggctaggttggctggccagtgagccccaggaatccaactgcctgcaccttcccactgctagctttttgctgttgtttgaaatgtggggtcttagggaccaaacatggtctttcatgctcttaagtttttacttactgagatatcaccacagcttcctaagtagatttttaaaaaatcatagttgggaccacactgcatataatgtgacacctatttgaaacatccaatatgttaggtatgacaacagaaagagaaaaaaaatgggttctcacatgtcaggaagaacacagtgacatggaccacatagcacatgaccaggacatggggaagttggaaaaagagtcctgtgttttgtgaccctgtggtgtgtgaatagagaatggaaactgaggatgtctaaagtctaaagtgcccaagcagggctttctataccaggaaactggtgggatcattgcaataacaagcttgggagtgtggacctagaacttctttgagctccttttctgctgggttgcagagagaggccatattgatcagtgttgagagaggtggctggtatggcctggctgtctctggtactcctgcttttgtcttccatgccttggaataggtttctggcatataggtgagaactaagggcatgaatatttgtcacttgggctcctgtgtcaagaatgtcttcagatgtgttactggagctcatgaattctgccagaccatggactcactccttaacgtggggaaattctcactacagatagcagaaaggcctagaaactgtatgtgttacagaaatggccatgggccatccatgtgtccctcatccctgggccaaacacctagcatgtgtctttatatttctacaaaactcagtggacactattgtgatctgtctccagaaacttctgtttaagtcctatccactgtcaaaagtcaaaatgacaacaaaatttaggtgacttaattggctttagagttaagtgctcttaattggcttcatttgtgacaccagaatcagacagcatctcatttcataaaacagaagtatggtcagaaaggagcttaagaaagcagaaccagagcaaagagaaaattggttgtttcaaagttacctatttgcatgtttatttatttgagtgcagggtcaaagccagggtctctcacagggtcttcaggcactctaccactgaggtatgggccagtctcagagtttttccagacaatatcttgctttgtagtcccagccgagttcaaattcaagatcctcctgcatctgtgtccaaatgttgggatgacaagcatgcatgcctggctcagaattatttatcttgtatatatccaagatgaggggattcccttgtgtgagccaaaaaaagtcacaaacaatttagttttgcttattgatgtggaatgtgaggacagtgaccccatttttgggtctagtgctgagctgatccaggtcaatgtcatcctgcaattttatttaccactccacaatgtgatggtatttgaagggggcatttgggaaatgattcagtttagacaaagtcatggattcacaataagattaatgagcttatgagaagaggaaaagaaatatctctttccactgagcaagtggaaaaggaggacatatgagcatatggagaaggcaagctggaatgggagccctcaccagggctccatgttggacccttcagttcatacttctagcccccaaaattgtggagaggaagatctgctgtttgagccaccacctctggtggttttctgtaacagcctgagcagacagtgagaacagcagtccttctcacgagtcactcctagtgtcttctttgactttaatgatgcgtgctctgtgtgtttctttacctttctggctagattttcctcaatttccatatagctttccccaagccttccttagaaatgggagttgctgacaggcaaatctccttcttccaccaaccctaagagcaccttgctcctgaatgtgtgtcacaggtagactaacaagaggactctcttggcacttgccaaaagtgtggattcaggctctgtcctgtggaatctgaggtgttctttagtggaagtctggcaagccctgttcttgacgatttcagtggccagctatgctccatcttccaggtgtacataccatatcttagtagattttgtgttattgtcacaaaatacctggactgggagatttataaaggaaatggtatgtatatttgggtgtgatagggtacctcagatttcactacaaggtaaaatggaagcgctaggggaagaaggagtattcaagagtgtgtggggtggtctcaaattgtaacaacctctcctaatatagtctgataggaccacaactcccacgatataaggattaaccccttatgaaaatagtgtgtgccctgtgacctagttatcttccaccaggccccacatcatgatagcactaactgccaacactgttataacacgaaaaataaaagacccagaaactggtattggggttcaagcttcaagcttaatatcaggaaagcaaagtagcgggccactagctcttacctctacctcagatcagaccaaaggggcgatcctcaaaatgctcctgacttcactgctccacagattcactcagactgctagagactaattggtttacatgagaccctttgctttttatatctccatagtgctgagattaaagacatgtgatcccaggcactgagatcatctttgtgtgagctgtttctctttaggactggatcaattttgtgtaatcagtgtggccttgaactaacagatatctgtctacctcttaatcctgagtcctaggattaaaggtgtgtatcaccactgcctgatctctatggcttgaggctgactttgctttctgaatcctcaggtaagttttagtaaatcataaataatacatcaccacacactgtagaaattggtttactgtagcacatgaaccttttagaggcaaaacatagcctttgaatcccaaatttctcttgctatctaatctggttcaactaacagagtttcccacttgtctacatttaaacacagttttcttctaatttgcttgcttatatgatctttttatgtcacacaataccacagacctcttcaagaggtaaatgttcagcttttagggattggaactttatctcaggtaaaacagaggacaagatgggttaaatgtataggcccagaaggacagagaggaaaattaaaggcatgtatggctaacatagcaatgaactaactggggcgtgatttgtcacagcaatggaatacttagattaacattccttcaatctcagaaacaaatcataaattaccataaatttctgggaaaaatattagaaggtattataaaggacagtcaccagctgttcaggttgtacaagaacagggcataatagttgctgatcttcaaaggcaccaatagctctacctttaaaatagttgacagaaaaatctatatgggttaagcagtggcttttagcaacagagaaactgcaggcattaaaacagctggtataggagcaactaaatgctgtgcatattgaagaatcaaccagcctttggaattctcctgtatttgttgtttaaaagaaatctagaaaaatggagaaggttaacagatctaagagccatcaataaagtgattcagccaatgggctctctattgtctggaattcctttgccttctctattgcctaaaggatggcctcttatagttattgatttaaaagattgcttattcactatacatttacaagaaaaagacacagaaaaatttgctttcatggtgtctatgaaaaataactcagcctgttaagagatatcaatgaaagattctctcaaagggaatgttaaatagccccaccctgtgccaatattttgtaagtcagccattgtaaataatatataagcaatttcctcaatctatattttaccatcatatggacaatattttactagctgactcaaatggagatggtggattggttggatccaaagcttgattgcattttggttattttaccctctaagcattctcctataggaatattaatgtggagggaagatattatcttagaatggatctttttaacacataaatagagtaaaaaaaattaaagcttaatgtggaaaaagtctctgtctggattcgaaaaggaaaatggagacttcatcaattagcattagtagaaacagcagaaattgtagtaccttttactaatggtgaaattgacaaattactgccagaaagtgaaccttggcaaagagcttgcagaaaatttttgggagcaattaacaacaaatatccccaaagcaagagaattcaatttatgaagaggactaactggatccttcctctcattgtaccaagaacaccaatatctggaatccctatattttatactgatgtaaataaatcaggaacgacaggttacaaatcagaaaatttaaataaagtgactcaaagccattatggttctgtccaaaagtcagaattatatgctattctcatggtattaatggattttacagaacctctccacatagttactgatacacaatatgcagatattgaaactgctgaatttatactagttaatacagaatggactctattatttatttagttacaggaaataattaggaataggatatatatatatatcacaatccaatcccattcaggtctgccaggccctctagcacaaggtattgatgaaagtgatcaactattaatgtgctggaggcctcagaattttataaaaaaacataatgttaacagcaaaggtttgatatacggtttttccatcacttgacaacaagccaaggaaattataaggaaatgtcctatttgttctttacacaaccaaactccactaccagcaagaagtaacccagaggttactcagaggaatggaatctggtggatggatggatggatgtgtttcattttatagaatctgaaaaattacaatatatatatatatatattgtatatatatatcacccttgatacctattcaggatttcaatgggctttgagttctgaaaaggctgactctataatcacacatttgttagaagttatggccatcatgggaatacctgtgcaaattaagactgacaatgattcagcatatgtctctgctaaaatgaaacttactttacttattacattatacagcatattacaggtataccacacaatcctacagagcaatcagttatagaaagatcaaatcaaactctaaaggatatgctaaataaacagaaggggtaataaagacctccagaaatagattgcataatactttattaaatttgaattttctgaatgctaatgagaaaggaacagcaattgtggagagacagaaaacctacagaattaaatcagcctgtatactttaagatgtgctgatcggagaatggaaaccaggatatgtgttagactggggcagcagttttgcttttttttttccacaggagaagaaaagctatgggtaccatcaaaattgataaagattagatgtgaacaagacacaccccttgattagaagaggtgctaatcaaacagcatggtcattcattctaaactaacttcaaaactaacaaatgcttttcatttgatcagatataactcgccataaggaaacctcccccaaaattagggttggggaagagttttgtgtttgtcttttcaggagaatgaaggcatccaggcaaggaatttgaagaccattggacaaataagacacctgaagaaaaaaggacaaatcatatagacaaaaaagtcccaagaaaaggagtaaattgtcctattagtatatcaaatctccaacagtataaaattttatgtctccccaaatgtttgtttctgcttctctacagacacacactgcaaatggtctttttgttgtcctggtccaattaaaaattaaagctggctttggagttggagtgtgactctctccttctattagcctaaacatgtttgttaaagtaaaatccaaagtctctgtctcatgtcagaagagccaccttctgtgggacagaaaaaaaaaccaaaattaagggactattttattgccaccaatctcataatcatttggttctattttgagtctttgaagcttttcttaaggtatagatattgtcttaaaatttataagatatgtatgtatatatattttaacttttgtcatgatattaatgactatatagagtactaattaattctagaaaagcttcctgtacatgattttgagtttgagcctctatcaggtaactaggaattaagtttttgtactctagatgtacaaaaacaaaactcttccccaaccctaattttgggggaggttcccttatggcaagttatatctgatcaaatgaaaaacatttgttagttttgaagtttgtttgattatcacctcttctaatcaaggggtgtttcttgatgaaatctaatctttatcagttttgatggatgccatagattttcttctcctatggaaacaaaacataacaaatattgatgctttaacctctttgagatctgctgcatataacatttaaaatgtttaagttttctgcagtgaaccatgcctaacagcgacctttgaagtctcccaaaggatgatggggccccacaataaccattgcaccaggactatgataacatcacttaagctgaaaaacaccacctgaagatctgctttggactataaactgctcaggacaattttgaggtggctagctgagatgatcccccctcacagactactctagccaggactactctagctaagcggagctagccactagttaaccatagagttttggaggtctctgtagacagacagaaagtgatatatatggctgggtagagagaggaagtgataaggtgtgtggctacaggagcacactctcttttcagctgggaagttgagtaggctgtggtttgctcccttatctctctgatctctcagcatttccccaataccatatgaagacctattacaacttgtgttacaatagtcaaagtaggtttctgcccccttacaacctcaaagaaagggctaagtatcaatgagttttggagggtatatatcttattcaaatcagcttgattctgttatttattattattattattattattattatttggaaaccatcaaaagaggagatcactcaaaagactggcttaggactcccatttaactgtatactcctgcaccaagtgctttcattggagttactcagaacttatagccagtatgccttgatctggctagcccactgactagcaagcctgttgccctagtgctcagcatcactctcagcttcttgttaggcattttgaatattacagaccttgtcacattcagttagaaatacttaaaaacatttcctcttccatagtaagtttcaaggtgtaccatcattttataaatatttactgttcagcgctaatcattatatttgctattagttattaagacagtgaggaaaaacagggctttcttactttagtgtcagatttttagaacatctatgaatgaccataatgagtccaagggaaggatattaaagatgtagtatgctgtgtgtcaggtactgtgtcctcacatgtcatatgaatgattcatatattatccttttcagagagatgtcataggcagcctggctgtacagcaacaaggaaattaaatagtttgtaactttgaagatgatcaaagagaatacattattaacatggaaatatatcaacaatattatattaaataaaaaagaaaattaagcatggaaaatttctaggtttttcttaaaaattagtataaagtatgcacgacaaaatttcaactaaaccattttcaatggtaagttctgtgttataaaatactaaacaggaaaaagaagaactattttcttctgtattctactctcagacttcaattataatactagatttctgtaatttttccactctatggattcccccaattccctgtactacccactggataacctacaattaaacttagttttgactttgtctacctaggcatagtaaggtgcccaaagaacaagtgcttaactccacagatttacacacattcaatgaggctgtgcaacactcttcctagggagatgtaaaggaaagtctactcaccacagagaggaaacccacaacaaaccaaagtacagatactaccaaagtccacattggtaaaccaagaggtctgttttggcagggatgggtagcagaaatgactagacagttgcatcgccaaaagcccaccctagtgtgagttaacacttcatacaatgtggaaacctacatcacactgcacagcctgctgtctgctcaacaggtttatgtgtcctttctaagatagttcggttggtctgagccactttctaaaacagatgcagctatgctggtctctgttttattttcctgggcagcttggatgatcttctgttttctttcaggtgactccacgggtctgagcctcttctagacagctcagcttgtctgagagagtctgtcagtagtctttacagtttatatatggaaagaaggagcctagtgaatctggtcagtttcaggagcttcctaaggactttgagttgtttacttcctgaggttaagcttcccttcagggtggaatatttcatcttgtttctcttcctttctaacatctggtagcttcagttaccctccatgatggaggttttgaactcagaggaaactgctacataagggatgctgatggcaagttcagcttttttcatctagattttagcagtctggttgcaagtcagggggtcccgaggttctcacctttgctcgtgtgctagaacagctcacagaatttaggaatatgacttgcttgactatgtagtggttactccaaaggatacattgaaggataaaaaccagcagcctgttgaaaagataggctagagtgaggtcacagcagaagctgacccagggagatgtggggttgcaccactctactggcatgtggatgcacttttgtgtttcctcctcccgagatgctgtttgaagccttgctttctaagattttatggaggagtgatcacttaggcgtggtagagtaaatcatttgtctctggtcatcaagccactgtcccgatcctctgtctctctttccaaagttaggggtgaggcatcaatgcacattccaaccctccagtcacacggataattcatctggcatttggagcccccatcagtccccaaccagcagtcacctcattagcatacaagaagacacttaagttttccaagatctttatgttttctaaaaatttcaagtgttttaggagctatgtgccaggaaaccagggcaaggaccaagaatagtttttgttttatgtcgggaacagatccagagtgttgcatatgttgtcagcatccatctctatactcttgttatgtttccaaatagaaactccacacacactagccccattctcccctctgtacagctgctggcattttacttcctgtatgtattactttgtctgttccagacacactacatcactggactcacacagtcttttccttcatgcttcatttgtatggtaacatatatgagaattcccttcctagttccaggacagcctccaaagccacagagaaaccctgtctcaaacaaacaaacaagcaaacaaacaaacaaaaaaagcttggcactattacatgaagattatagaacagattctgcttatccattcaccggtcaatagactttcgtttcgggttgagttgcttccactattgggagattgggattatagagcaatggtgaacatgggtgtccacatagcagtttgagtgcctgcttctagttattggaggaaaattgctggattctctggtaattctctttgtaacatcacagtgttttccacagaggccacatcatttaacaatattatcagaaagacatcagggttccaattcttctatgtccttgtcaacacattattttttcttttgctctttcaatcaccattgtaatgcatgcaaagttacaattttattcttttttgttgttattgttgttttttcaagacagggtttctctgtgtagctttggagcctattgcaattttactcttaaaaagttatatttaaatatttacttgtatatttacttgtaaagagataagtaaatgaataaataaattctctgaagtatttcctacagatagtgacaatttaccagtttatgtggggggcggggtgtgggacacagcttattgttgctgtctttttacccaattttctccttgtcctgccttagacatttataatatggccatgacaagtgttctgaattgggagtcaagctgcttcccttcccaagttcatggtcattccccattgctctggcagtgcccaacctgcatttgatttaaacctgcttaacattgcacatgccaaggctagcctcggatgcgccagtgcttggggacccgctgccatgtgtccctctgtgaagtgaagcagaaccagggcttcctggcagcagatcaggtccccacacttgcctctctgccaccttgcacacccccgcccttctctgtcttcagcacaaagctctctcctttcccgtttgttcacttaccaaggttgtcaggtcaccgtagctgactgcaagtggaagggaagtacacttcctgttctgtgaaactgcgtggtctgtaattttccagtaggctttaaagcccacagcaagcgctcatctcagcttcaaaggcagccaagatagagcaacttgaagaaaaaaaaaaggagcggggaaacatttccatggagctagttactaccttaaaaaagttaagatgaacccattaatgttattcggtttgccttattggacttatgtgcaggttgagaaggtggattagaaggtttttgttttgttttccattgttaaagagtttgatgtcccaggcatcaggtacagctgtttaagggctattttatagccaggtaagagactatctgagattttccattttaatcagtcttcgggggcatttttctagagtgtgcatttgcttctgttactgttgttgggatatacttctgcctggcttaatctgaggaccgagaagctgaatcagtagacaggagaccgttgactctgcctgagcttgggctgttgggacttacatgaccacattgcctctgttcagataagggaagaagtgagggctggtgactggttgcaggcagggagttgcaatgaagatcatattgcaatgtggaggtgaagttttctccattatttttttttaacattttacaactgagcaacagtattactgattttattcctcctcagcattttgtccccgtggccagatttcgcagactttccatacagaaacagctgaagcctacagggtttggctttctgttccccttccttctttgcttctggctttctgtagcagtggcttgcctagctccatgactgtctttccaggcagcctgttcctccctgtcacagtagtcctggctagaataggccttagtggcccagatgtggtggggacactgcactccaccagtagcattcttgccaatctaactgtggggttttgctcaccaattacagaggtcctccatttatggagatgtttgacttaatggttagtgtgaattgtcagcccgatggaatctaaaatcacctgggagctgggcccctcaacttgtctgtggatgactgtcttcattgtgttaataagatgggaagaccacctactgtaggtggcaccattccctaagcaggggaacctagactgtgtaagaccagagtaagtgagctgagatccaccctgcattcattgccttcttctgtggacacaatgtaatcagccacttggagcttctggtgctttgccttctctgctgtaatggactgtaacccaaactgggagctgaattagaccctttgtcccttaagttgcttttgtcagagtattttaccatagcaacagaaaacaaactaagacaacttatagttatttttaaacttatatttggtggaaactgtagttcaaattttgaattttaatctttttttgtcaggctagcaatattcagtaagctaccttaatgctggacattgacagtgggacacagctcccagtcagtcacatgattttgagggagagtaattcatactccacagtgtgctgggttcctgtgttaccagcacacacaatgcctatgtgtgcacacatgagacattgaacacttgattatgaagtaggctcttttgctggattattttgacaagctgaaggctaaacaaccagaggtaggctaaaacctctgagtatgaggtagttcagacgaagctatgatgtttcataggttaggtatatcagagatatttttagcttgtggtattctttgctctctctccatcctctcctccctacctctcttttctgtatcttccttcctgtctttgtatctctctttttttgcatgctaggaaagagctgagccatggaactgcccctccagtcactctacttaagggtattttcaaaatctgtgggtttattggattgtgtgtagcctcatcatacactgaggaatactcttacgtctcttgacctatctggttccaaggttgtcttcaggtcactacctgtgaccagtgtctgtgcctttgatttatgtagatttagaaatgcacttagtcacaccctcactagagattgcctttttctctccaccgcacaatgtgcaatcattttgtgcttcattttcttcaagcagactgtccacacaggaggcaaaaagcctcaaagagagcagtttgtgcaggcccatgggggcagaggtcagcattgcagagaccttgcatagtttggagtgagattggaatagccactgtggattagatatcattaacttacatgggattttctcttttgtcaggaggaattgcttctgttttctgcttttatttttaacttttctgaaattaaacaaacctatgtttacataatgatgctagataaagtctcatttgtttaacaggacattttaaaaataaatgaagataatgcaaaattatagaagccagctacacaaaaaataagtcttttgatatgttatataattcagtaagcatttttcatatgtgaaggaagtgtccctaatttccttaatgcctgtggaggaagtttcttccttctggagtttatatcagcagtctgaagattaacaggtaaataaattagtgaaagagacaaatcatgacctgtgtgtggtgaagtgagtgaaaagcttcatttaatccaggcttactagggattggggacagaggtgccatagaattgtggggagtctcagaaagatacttaaattgcttcttttttaatttattagtgccattactgttcttgtgtgtgtctgtgtgcatggtgcggggtgtgtgtgtgtgtgtgtgtgtgtgtgtgtgtgtgtgtgtgtgtgtgtaccacagtcagttctctatttccatctttacctgggttctgagaatcaaactcaatctcctttacccactgagtcatctcagtggcccagaaagagactcatgaatggagaccagactggcacaaagcactggctctcggaagacagggaagagcaagcctgagagcctgaggcagaaatgaggttggcattttctaagaatggaacgactgtctggaaagctgtttcactgagatgggtacaatgatggaaggtgatgtttgaggatttgaagggtcaggtcattcaagatactctgaccatacataggtaaagttaggaaatcattaaagctttaagcagtgacgtactgtccaataaatagcgctgctttctctgtaacttgatgtctttgtcaccatagtgttgtggaatattatttgaagatgtgttacatctgcttatgctctggaacatttgtttaatgatgcaaaaacatgttacattcccgaaagttgcatttgtttaactctgtgaagttgtgttactttgcctgtctaaaatgcccaatgtgtctaataaagagctgaatggccaatagcaaggcaggagaaaggataggcagggctggcaggcagagagaataaataaaaggagaaatctaggaggagaagatcaaggggcaagaaaagattgggccagccacacagctacacagccagccctggagtaagagtgaaagaaaagatgtacaggaatagagaaaggtaaaagctcataagcacaacgtagatgtgataatctaagaaaagctgaagtgtgtgtgtgtgtgtgtgtgtgtgtgtgtgtctgtgtgtgtgttgagtgtgtgtgttgagtgtgtgtgtgtctgcctgcctgcctatctgtccgtctgtctccccatctgtacaatggcccttctttgaatatctgatgtttaatggcactgcaggtgtcaaggattctgtcacacatttctcacacatgtgtcatggtgtatttgtatatttatttctcttggcatagcatagatcatgtgcaatgtccgtcttcaacttttacggacactggcagttttcaaaactaatcgcaaaaagtttcacttccaccaatggcatatgaaagccccctgccttcacatctttcctaacttcaaaatgactgtttatctgtctggtgtgtctctgggggaggggggctatcccaatgtgagcatgagcatttaattaacagactttctctttttaaggacacttttatttttctaattatttgtatttaaaatctttattctttgagactttgatagacatatacaatgaaataccatcatagccgcccccattcccttcccccagctgcccctggatacttcccaagagatcccctcccaatttcatgctccctcccaccccagccacctcctcctcctcctcctcctcctcctcctcctcctcctcctcctcctcctcctccacctcctcctcctcctcctccacctcctcctcctcctcttctttttctttacaatgcattgggtccaattaatgttgcgcataggcatgggtgtggagcatccaccggagcataggcaacttagcagtaaccacagccccaaggaagaatgacgctccttcacccatcagctttcagcgagaatacaccccaggaagggcggggcctcacgagctcctcctccagccatgctggaattttggttggctttatatgcatacacgtagtgcaatagccagggcatgtcaaggagacggcgttccacagcacttttccacatcctcatttttcctctcttcttttcctcagtgttctctgagctttggggtgggggtgttgacaaaaaatgtcctatagggctgagcactcgtggtcacttattcttagcacgtcacattagaagatgccggattcccatatactccctctggccacccgcactttcctctattattaacgctgtacattagtatgataaatttgttatgttttgatgagtcaataatgattccgtattaactacagcagtttgtttacattagggtatacatttctctgtatcgtattgtgttattctgtttcagaggcagggcctgactaacgagccaggctgaatgaacttgctgacttagtctcctgttgctgcgattacacttacacagcacactgcttgcctcttgtccttgcaacttgtatttctgtgactacaaatgagacctttgctgcttcctgggtattcctcctatattcttggtggaggccgttggctggttacagatacggtagatacatcctctcactctggcttcactttaagttctcgacatcctttaaaacctggaagtgtagctcaattgatggagttcttgtctagtttgcacagaaccttgggtttgattccccaggcctgagagcatggtgctgcatgcctttcacacctacacttgatgggtggaggcaggaagatcataaatcccaggtgatccttagctccatagcaagcttgaggccagcctgggatataggagaccttgtctcaaaaaacaagcaaacatacaaaataaaccatgttcttttatgaacatagttgttgacttcaagatagtcaaatataacagttatttcctttttgattggagctttttgattcctgttttagaattcttcccactctttttagccattagagatccaggaaccccccacctctgtgggaatatttccaagactcctattgtaaaactgtaaatagtgctgaactctatactttcccctctacatatacacccaaaagtttaatttataaatgccacaaacaataggttaacagtataattaaataaaacagaagaattctaatgatatactctaattaaaggctgtatgaatgtggcccttctacattgccacagggtaggtcacaattaggggaatgagtcattctgggtgggaagaaagaagaccagtgtggacttttatcatactcctcagaaatggcaatttaagacttatgaattatttatttctgggattttttgtttatgtacttgtttttgaaggcagggtttctctgtttaacagtgctggctgtcctggaactcgctttgtaggccaggctgctcttgaattcacagagatcctcctgactcttcctcctgagtactatttctgttaatatttttagaccaaggttgatacaggtaactatgattgctaaaaacaaagtcatggataagcagcattgttgcattgtgtttgtcatgcttttgatttacatatttagttggttttggtcgaaagtgtgcaataaggggatgtgggtctttacatcaattttattggacctgaaatgggattgagtttttattgcatttctttcatcatttatttactcattgttcttgtgaattgtactacttggactttgagtttcccaaattaacctgtgaatttttattttattttttgggggggaggtggtttcaagacagggcttttctgtggctttggaggatgtcctggaactagctcttgtagtctaggctggtcttgaactcacagagattggcctgcctctgcctcccaagtgctgggattaaaggcatgtgcaccacccagggacctatgagttttttattctttataatagctcatatatctttgtgctcttgtgtattttgtgggatattttttcaaccatgtcttccaattctactaaattccacatttccattatcataatttaaattccaaaggctctttttcagttttcaaatgtttttctttatttctaaaattttaatttattatcattgtgtgcgttatatggatatgtgcatgtgtatgcctgtgtgtgtgtgtgtgtttgtgtgtgtgtgtgtgtgtgtgtgtgtgtgtgtgtgtgtgtgtaggtcagaagacaacattaggtagttggttctctcttgccaccctgggttgggggagttaaactcaggtgttcaggcatatgtggcatcatccctgctaagccatctggctgtctcaatgtctctttctttgtaggtttctattcttgtcacatttatgtgccatccatttgtctccttggatttatttttaatttctatttaagtttattttactgtatgtggatatgtgttttgctggcatgtatgcatgtgaatccacacatgtgcctggtgcccagggaggtcagaagagcatgtcttttggatccctaggaactggagttatggatggttgggaccatagtgtaagtgctgggaactgaacccagattcccagccagagcaacaaattttcccacctagccaccattccaccccatccttggatgttttaaactttttctttctcatgcttgcctgccctttcatgctctgaattatgtttgtttctctgaagtcttttcttgcttgattcatctctccaattttatattaatggttaatatagttcttagtaatgttaataattaaactcttaattatttgatgatctgtgtctgtctgttcgtctcagaatggctcactgacaagcttattagaaggcaaggggtttagcaagttttgttaagtcagcagccttccacacagcgatggcttgaagttcctggggaatgctcccaaatgtcaggatcttatctctccttttggtcagtgtcaccacacccatttgagtctttggtagctagacccctggctggagtcctagtggctgtgtttaggggtacttcaccactcaccatgataacctgattgctttgtctggtgttttacctttccccactcacccagctgtctgctccttccaaagatagtctgtggcatttctacagaataaacacactcagcaccagttttcttccaaaagggaaagctgattatcaggggaaagggttgggacttttaggacttcccacaatttttatttttagcccattccatactcagtatactttagaaattctctcttccattattgattttttttctgggatctgaaaattgagtcacttttattcacattgtctcctatctgccactatttgagtgtttgttcaaagagggatagaaatgggtccaggcatgatggcagatacctgataatcccgacacccaggattagaggcaggaggatctggagttcaaagccagtctcagctactagaaaattcaaagtgtttgtgtgtgtgtgtgtgtgtgtgtgtgtgtgtgtgtgtgtgtgtgtgtgtgtgtgtgtgttaaagtgcatttgtttagacccctcatgcagtagggtaactgtgggatggatgccaggagctgggggtgaggtagctcagtttgcattctgggtctcggtggctcctgttttgttaagtcagataccatctgttcattcacttcccggcttccaaaatttatttgacgtctcttatttgccatcacctttcctcctgctctctttatcctgtggcttaggttcttttcagtttttaattatcagtggtgcattaggaggaagtagacttgggtgtgttcactctgctgaactcatcacagctcacacactgattctctgttaatggcaccatagtccagtgcttttcatatcaggtcatgctgatgactcctgcacaaatatcagaggatttggggggagggagactatatggcaaattcctgagtgtggaagtactgggttagaagttaattgattttgataagcattaccaaataaccttcaaaaaggaaccaataatacttctataacactatatatgagacaagacaggtcattattgataactaacttcaggtcctttgggctgctggactgatggatctgattgcttaatttaacatacttctatttaataataatgctggtagactttcacattggataaccaaaaactcaatactaaacattactgtttttgtagttatttaagaaaagtgtgtgataagcacttagttaatttgcccagttgaaatggagccaggaccatggctcaagtctggtttactggctgtactgtttgacaggttaattaatctctggctgtaccgaaatctttggcattgaaggaaccagtggtattgttatagttgctttgataaaaatcacttcaggaaaggccctacgtgtgtctgctttgtgttgcaaactccttttcatcttcactctgcttctaacatgattcctgactcgtctagttatttgaaaggttgaacagaaaggaataaaatttatttacacctgtggaaccctggaaagatgatgtcttagttaggtttttattgctgtgataaacaaattgtgaccaaaagaaactcggagaaaaaagttttttgttttttgtttttttgtttttcatcttatgatagtaagtgagggtaggaacctgaaagcaggaactgaagagacaggctatccaagaatgtcgctcactggctggctttacatggcttgcctagccggcttttttatattacccaggactacctgtccaagggtggcaccacccactgtgatctgggtccttccatgtcaatcactaattaataaaatgtccctgctttccgagtgctgacagtaaaggcatagcaattaattcttaaaggtgccattttccatcagattgtcctgtagggcaagtctgtggtacactttcttgattttccctttaattgtttaacggatgaactacgattggtatacttacatatatgtgtgcaagtctgtttcacaaccgtgtatcttgttgcatctttcaacattactttgcccttccttgtgttcatctgtgtgggtctgtctaggctcttccttttcctgctcacaaatatactaggcttgttggggtcttctttaccctgatttgttttctttctttcattattctccatcttttcctctgcatctccatgtacaccttctcaaccatgtgcatttacaggggctgtgacttctgactgatttgttcttctcttcctgccatctgagctcatctcccctaagcctgtctcgagcatccttgggtgtaggtagcatcaactcattaccggagttaggcagaaggggtgggggggggttctgtggaatggttcacatacatgaagactagaggcttaaagtgtctcagggagcctggggcaggaggagccagtggacatcatgagcagatgaaataggggtctatggaggcactggcaccaacacgtggcatttcccattctcttcctctttgatgttgcatgattttctgttctgggtctagttcagtttcataatcgcatggctattgacatttggggtgatacagctctttttacttatttttccaggaatgtcctgtgcattataggatgtttattggcattctttgctctgtctactggataccaaggtagctcctaattggcatttgaaatgcaaaaacctgtttccatttaaatgaattttggacttctccagtgtgctcctgctaatctagttaggcttctgttttcctatgtataaacatattgtgcttgttgggttttttttctctgactcatgttttactctgactcataccccaattatgaccaccaaatttgtctctacattttgccaaatattctttgagggtcaaattacccctgcttgggaactattggtgtttatcgtattagtttcttgtttcagtatctctgagctctagcctaattcagtcctatggaatgagtgtacactcctggtctgattaataaggctatggaggtgcccatcatgaagcaaaacacactggcaggtcccctttcctgggggcagggatcattttaaatttcccttgaagctcagtttgttttccattcagacatacaaaatttccaattgatgtggaaaatgttctaatgttattttattatactttttgtttctttgaaacaggcccttacaatagccctggctagcctaggaattgttatgtagatcaggctgtcctcgaattcacagagctctctgcctcctgagtgttggaattaaagtgtgcaccaccatgccaggccctaaataattttttaaaaaactttcttaaacaggttatcttttatttaatggaaccttcattacttgtgaagatggcaaagtgagggttgagggcaaaggctttggagttcatggctactgtgccacttgccagctggtggcttaaacagactatttggagtctctttgtcccagtttcctcatcttcaaaatgacagttgtgataaaagcaatccaggaattgagacacttgtatcccttatcagctgttccagagcatgactttacagacatcagttaagttacataactctcagatttgtgaattgaaatgtctgggaatccttggggctaggtatttggttataacttgaggagcaggattttttgatctatagcagtgccctgtaacgaggtaacaaaccattctacagtagaacataagaatactctaccaggaagcagataaaatttctaaatagtttaggttttacaccttgccagatatgaaaaaaaaaacaagttgtttacaaagttttttgaaggtttaagttgctcatgtgtcttcatttagcaggtgagaaaaataggttccgaagggctagacacttaatcaggagtatgcttttaaaaacgcacaagttgaggtttaaatgcaggggtttgggtgtcccagaattgtgttctcagctacagtgccattgagggttcctgtgaggtctaaatgagccaacctgaatgaaaacacacgtgtaaagccagggtagggcaggtggtgagtccatttaagcacttacgcctagcatgcctctctgcttttgagaatcactttgatttattgtgtcctagtcagcagctcagtgatttactcccttcattaagtcagagcttcctgtcctctttagggcgggctgacctcaaaattcatcactaccctaagccacactgtagtaagcatgtggccctaaatgtcccatgactttaggctgcagccagcagggactctccaaacttcatgagctgaaaggatttatcactggctgcatgtttgtgtctctcaaactccatatgctgaagccctagccctcaataagacttgatttgctgacagtgcctgcaaggaagtcattatggttaaatgaggtcttaagagtggcggctggtctaatggaattagtttccttatgtctcagtttgttttctattgcccaaaacacagtatctaagacatggcaaatgccctagttttattcatatccatgtgacaaatactctgacaaaaggcaacacaggggttgaaagggtttatttgatttataattcgaagctcatcattttgtcaaagtcaaggcagaaactcaagcagctacttgcgttatagccaaagttgagagcaaagagagagagagtaaacacaccctcgcttgcccttgctagctttctcctcttttatactgttcagaattccttgcctagggaatggtgccaccccctatgagctgggtcttcttacaccaactaacacttaagacactccactgtcaagcctacaggccaacttcatctagataattcctaagcaagactgtcttcccaggtgattcttggttgtatcaagctgacaattaaaactgaccagcacagcacaatgagttataaagaaatgaggtttattttggcttatggctctggtccaagatggaggagctaccttttaaagatggccttcctgtttgttgagtcctgaggcagcacaaggcaccacattgtgagaaacagaaagtgtaagaaggacctaactaaactggctttatagaaaacacaccccagaagtaacccacgtcaatattaagccattaatggcataatggatgaatccattcctgaaggcagagccctaattgcttctcaaagatcccaactggtcctgtattttaatagctcataatggggattaaatttcggcatgagtgccaaaggaaaaactgtgttcaaaccacagcactctgtaagaagagatactggggaactccagtttttcctctttcccatgcatatgctccaaggaatgccaggtgaagtaggtatgttctctaaaccagaaaaggaactctcacaaggagctgaattttctggaaaatctgctcttcagaattgtaagagaatacgttgcagttgtttcagccctgcagtacgcagtgttttgttaggcagcatgggtgggcttatatagacagtgtgtcacacctgacccagcttggcagtcaggttaataaagtactcagatgtgtttccttctagaaagaatgggttcaagctgttaaattttctgggtcttgttttcctcttttctttttgacttactgctctctactgttagattcttaactagggcttctcattcttggttataggtctgactgagatgctccctattgagacaagtcggtcatccatctataagtgggggctggaatacataaaaccaaatttgttgcatggaatccagaggaaaagtcactggacatgagtcataggcatgcacccgagaagaaagagtagtagattggcagtgtagaccatggccatttactggcctttgttgggctgttttgattggtatcaatcttgaggtatgagactcagtaaattaaatttgcataatttggggggtcttttctagatgcagagtgagggttaaagatatgaggaataagagcctaaattgtgcttttcagtgttgcagatggttatttgccagaaatgaaaacgttcattcactctcctcagattatcttatttaaagactcgaagcctgctgtagcatgtggaagagacaggactgctgcccattcaaggccaaaaacaaattggagagctattcagcgtgatttgagcttttacctatttacagcttgcaaacattaacttgttcttatcacttagcctgcagtaagactatttttccattatcggcattttctgaagaaattcatcaaagaaaccaaagtgatttcctcatgggaacctaacatgctaagagaacatagcattctcattgtgtgaggggcagctctctgtggacttgctctctgtgttatttactcaccaaatattgcatcactttataagaggaaagcagtttggaagattttaatcaaagaccagactgggataaaccttttattttattcgtataagccctcgaatatctatctgtgcacatatcccctgctaaacaggttgtagcaagtcacaagccaattttcaaaattttgaatttgtattgaatccttcatgtgtgcagaaggagggaggctcttgtgtgctgtggtatggatgtggaggcagaagacaactcagtcctttgtgttatcaggaattaaactcaagtagtcagatctgtttggcaagtacctttacctactgagccattcttatggctgctgttttagacagagtcttactttctagtgacaaaggtttgccttgaactcatagcaaccctcctgccttggccctaaatgctaagattacatctgtgagccaaaatacaagcttactttattattttaaattttgtaaagtatgcattattattgaacctctcgcaagtcaatgcacaggaaaaccctggctgccttgacatcttaaccctctctcaggaagaccaaaagttttcagacatctcaagctaggttggacacacacacacacacacacacacacacacacacacacacacacacacacacacacacacacacacgcatgcacacacactattaaaacattaaggaaaagacttaaaacttttgggtacataactgacccccaaacaatatggttacctccccttcatggactcagagtgtagtctaggcagccatccaggaggtagcttttgggacagccagggacttcctgtagctatgtatctatctcatggactcttggaatgactattttttaaacagtatgattcaagccctcagccacattgcagaactttgaggatgcttgttccaaccaaatgctgtcccttctgtgttacagtttttcagtccttccttccttccttccttccttccttccttccttccttccttctttccttccttccttccttcttccctccctccctcccttccttcttccctccctcccttcttccctccctccctccctcctccctccctccctccctccctccctccctcctccctccctgtctctctcattccctccttctctcccttctttccttccttcctttttctttctcgtgcccatgtatttatacatgtatatttatggtattacattgtgtgttttccttttgaaatgagcccagtacatgtgtacctttagtgtgttgttacgattctcagactgatttgtaaggctttattattctttatggttggatatatcatccatacagcacttaggaaaaatcatcaaaaggaaagaaatagaaacatatgtatttgacaaaattttcctgtgaagaatttctatgtgcagttcaaatgagaggagcagctatatgctgcaatgaagccaaaatcatgtaaacattgaagggactcgtggatttgtagtcctcttgtttctccccatcaatatttgactcttttgtattatctcaatagtggaaaattgacagtggatgaagatgttgggtcttttagtttttccttttgatactataagaaaaatatctgttttcagttactttctaataaatatttaaaaatattaaaaatacttatttactagtaacatttaaacatgctactatttgatacagcaacgtatttaagagtgtgtgtgtgtgtgtgtgtgtgtgtgtgtgtgtgtgtgtgtgtgtgtggctgtaggtgggtatcaaactcagagaatttactcatgctggtcaagtgctctctaattgagctacaccctcagcttctagctaagcaattctttttgagcacctacataaagattgtatgccagtgtctcttgcttttaaattattaatagactgaaacaaataaataaagatggagaatgcgtctgctgatagtataggggcagagattagtatttgttaatatatgacattttttattatgtgctttcccatgtattttgacttacaagtggagttcaagcctattaaagagagattagtaatcttaagggatgtggtgggagagttttagaaagccaggtgactttataacttgtccctgagttgcgttgcagagacatacatgaccaacctcatggcaggcaatgctccatgtgcttcaaaacgtactggtgagatggttcaggggtaaaggctcagggctgaagacttgagtgcaatcgctgagctcaaggtgtcgaggagagaactgcctccttcgaagtgctctctgacctacacactcgcactgtggagagtacacacacacacacacacacacacacacacacacacacacacacacacacacacaaatgctcgcactgtggagagtacacacacacacggagtttcacaaagaatcagaagtgtgatatagttagctagtaggacatacagacatcagtgtgacatcatatatatatatatatgtgtgtgtgtgtgtgtgtgtgtgtgtataacatggccttaaaggcctcaccgaatggttttgtacctgagctgagggacccttagatttcttaagcgaggagaattttgtttagaggaatgtgggattctttttattttagaaatcccgaatctgggaaagggactggcaagaaggagaagaggatgatgggtggaagagaagacagagggtgtagggagagaataatcagaaagtattatacacacataaaactgtagaagagctaaactcatctttaaaaattaaagtattcccagaaatgactagctagtgcttctctgcacatgtgcattcaaggtaccttactgactgataagaaacctgcagcttggcagaaagatgagaagcagagattgaggtttgaaggtgacaactggctgaggccgggaagtgcctgtgtctcacagagaatggggaggctaatctcacaagtaagttttgtattcagaacaccaaaagatcctactcagtgactgcagagacttgtagcttaagtgtgaggctgagcaccagctccagacttgaccacagccctagtgcatgcaaggcaaaccagcctgggggttatgctactgtgcagccatttccattgctctcttcgggttcacccaccatccgatttctaccctgctctctgctctggaagctggcagcatggacagcatcagctggcgtcttgctgggttgaaaaaccccaccctggcattcagatggcagaaggaccctgaggatggcacacacatttctttccttcagtgtttcacagtcacattttatagagtggctgcttccctttccctgggaacttttacagcaacacaccaagggtcctgtagctgttttctccctttgccttctcaagcaccgtgcaataacactgttggttgttactgtcacctttactggattttcaactgcccatacctttgtgaattgcaccactgttgaattttctcccactacctagttcctgttggaccttatatgttgttaaccagtaagagagcatattctccaaggctgtcctgcataaagagaggggcatctgctctggaagcctcgggcctgggagacaaataaacaagtctagggactgtaaatccgcacacatatgtgccatgttggcagtcagtggaatgtactacatgtcaccatgattttcagatatatagaaatgccttagtgagcccccataaaacacagcttatttgaaaatgtgagggtcaccttacctgatgtctttgtacatcccatcagataatttgtgttaatagtaataatgactacttccattctggctaagggcatatttttgaatacacggatcattctcacatacaaaaaagctgggacctagttctgagatgttcattgtgacaatactgtttggggtctgaaaccagaaggtgggatcaaatgattcattttaaaatgttcttacgaggaatgaaagaaaggtgactaggccagatctggaaaaaaggtttcataaaattatttctaacttttttatttcaagaaggaagtttaggttctgagtcttagggcgcaggaagaatgaaagaaaagaaatgactacactccattctcgtctcagctacaccttgtcctttgtgtgacctgctgtggctcaagcagtgaacagagtcgacagaacacaaaaataaacatctccgagggcctgtggaatttgatggcctgtgtaatgtggggcagacagcaggcagcatgccaggctctgcaggtgagccctcccaaggcccatactcctttttaaccactcgggaaaaggaaagagatgtgaagcctggtagagaagttctacttctaggcttgcttgcccccactctattgccagagcctagacttgccctgtgttcccagtgagatgtagtcacttagcgcttcctgacttagcttctgggaaggctggttacagtgaccacaaagaacagagaaagaatgggtaaactctttcgccatttctcaagttccttgtatcacatgcctatgtgatttaagaaaatattcagacgtgagagttggagaagttcaatgcttgttgactactattttgcttctagctaccaacttaggctcacttctaaacaatggttctctcaatattccataattcaaagggttaacttctagctagctaacatatttgactcactgtccctcctgtctccacaatatgacagtgtatagcaattacagacagaggaaatgtggtactgacaggctgtaagttgttcttcaataacaggcttcctagtgatcaaaaaaaaaaaaaaaaaaaaaaagaccttgtgcaatatatctcaaaccccaggttctcctctggaatcaagatgcctttagtataatgtgatctgacttagtaatgccatgttctgcaactgtgtaaacaggggttagagagcgtgcaggataacattgagttagatgaaaaattattcgatggactgcataaatacaaagcaccagcttcatgccaggccttttgtctatacttaggatgtaatgtctgtctccatctcagccatcttgatctcaatagcatcatcagtctatatgatccatgtcccaaagaagattctgctcagggctcccacttactccaattctccaaataagagagaaaagaactctgttactgttgaaaatggagctctgggacaagttcttgctcttaaactaccttgtaatcagcttagcaataaacactctctgatattgcctggagttacagactgtgttatcaggagctgaatgggtggggaaatattttcctttctgtgctggtggaaacactggttgtccccgctccttcctttcttttgggtcaaatcacatgtggatcacttgggtgtttgttctgggggttttatatacagtatttctagcttcaaaataccagacacaatggagaaactgttgcagcttcttctgcaaaggtcagcgttacaatttaatgcccaaaggtccctgacacacatccaaagccttctggtggaagctggcagttgtttgcttgttactaggatctgcctgaggactaataagagagaaacagacaggaagaaagaaagagcaaaacagtggtctttctttatgcaagaatagcatctttttttgccgtgacacaagaggaaagccattaaacaacacaaataagtaactccttgttcaactaaaagcacatacctaacaccaaggactctaaattgacaataacagcttggaccaggccaaagcctatccaaattgaacagaaatttttgttttctaataatggtctcccatatcagtccttgtatatgaatttgcccctggatgagagtgcccctcaatgttgttgcatggatgtaaaggctcagagactcttctgaaattctctcctaacatacttggaaatttgtcctttaatagtctctaatgtacacggtcccttggcgtttcctagccaaaggccagaatgttgaatgaaccttggatcttgggtggggtagaactagacatttacttgtttaaaatgagtgcaaaatgtgactgacaggcaagtagttcctcagtgaatattcatgagagacctacagttagctgggcttagcaaatggagccaggcactgatgccaggacacaaagccaaaaggatacttccaagaccaagtatagatacttcctcctgcttctacacaaacaggcttatctagaaagaccagattcaaatggttagaacaccctaagcactatgaatgttatacccccacagaatgccttcaaagtgtagaaacagcagcaatagaatctactctgaagtcttacaatttctttgtttctgtcataaatctaaattcttcacaagtctgatttttaagtgaaggtaagaatgggaaattcttttgtgtgtgtgtgacagagtttctctgtattgctttggagtctggcatggaacttgctctgtagacaaggcctctgcctccccagtgctgggattaaaggcatgtgccaccaatgcccaacttgtgtcctttcttaaaaatgtctatccccatattttaaagatctttcccattttcttctagcatttttatagtttttacttttgtgctcatatctgttgcccattcagagttggtgtggcttaagaccctgggtttatttccccccatgaattagtctattctgccctgattatctcattggcagtatcacgtggtattgtttactttggtttagaataggctttaaaatcagttggtaggtcttcaacctgtgttcactcttttaaaaaagtatttatttttattttatgtgaattagtgttttgcctgcatgcttgtcttggcaccacatgtgtgcctgatgccagcaaaggctagaagagagtgctacatcccttggtactggagttactgaccactctatgtgggagctagcaccactcgtgtaggcactaggacctgaatccaggtcctctgtaatagcagcaagcacagttaacttcagagccaacaatctagtcccaattctttctcttaaaaattcttttggcttttttagagctttcatattttcttacagattttagaatctgcttgtcattctctattaaaaaaaaaaactattggcattttggttgggatttcattggaattatttgtcaatttggggagggataatactctccaagtattgaaatcagtaaacatggcttgtctatttctctgtctcacaggactccttaaatttctctcagggctgtttgtagtattttcagtaatatgtgtatgcacattatagtaaattcacaagcatttctaattcttcagactttataaagtagtattttaactccaactttgaaataaatttttaaaaattattattatgtgtgtatgggcattttgtcttcatgcatgtctgtattccatgtgtattcctggtgcttccatgtccagatgaagttagattccctagaactggtgttatagatggttgtgagccatcgtgtgagttctggaagtaagaactggaagagcggccagtattctcaaaccctgagccatttctccatttcctaaactccaatttgtaattgcttatcattgacataaaaatagaatttagtataaaagtagtaacaataaattccaactaattgaaattaataacctttgtttttcaaaatgtagcacaaagaagtgaacaagccataaagagtgagaaaatatttgcagtgtatgaattcatatctagaataaataattcttatatcccaataaagtgagagcttagtggtttaataggtgcttcatacaagaagatttatgaatagttaattattttgtgaaaagtagttaccagggcagtacaaatcagaactaaaatgggagcactggctacacactgggatagctgaaataaacgtatctcagtaccaagtattgccaagactgagaggtatttggaagtcagtatgatgctgacagtatcacacaaccatttcaagtagcttggctgttttttcttataggtatatatttatgtaagactcagcagtgtcattcctagaaatttactatagaaaataaaacatatgtccacaaaacacttgtacaccattgttcatggttttatttataacgatcttaaaactggagtcaacactaatgtccatcataggtgaatgaatgaacaaactgtaatgggtccatagtactgactactaaggagcaatgaggtagaattagctatgaacaaagcaaacagaatgaagctcaaaacgtcatcagatgcttctagaggtatagctcggtggtaaaacatatgcttaaaatggatgcggtccaaggttaagccctcgaattaaagaaatctcagattgtatgaaatgtttttaaagatttatttattatgtctacagtgttcttgcctgtgtgtacacctgcatgccagaagagggcaccagatctcattatggatgggccactatgtggttgctaggaattgaactcaggacctctggaagaacagtcagtgttcttaactgctgagccgtctctccagcctcacggtataaaattcttagcagacaaattagtttataccgacaaaagcaaatcagtggtaacctcatgcttggtttagtgcatgggagcatgatggaagcattagttggtggtaaaatgttctgtcttgattatggtcatgtacttagacaaatgcatacatttgtaaaacacattggaatgcagtctttaaaatgattgtgttttggcacctggagagatggctcagcagtcaagagcactggctgttctaccagaggaccagagttcagttcccagcaaccacatgacagctcactcctgtctgtattttcagttccaggggatcggatgtcctcttctgaccttcataagcactgcactcatacatacacacacacacacacacacacacacacacacacacacacacacacacacacacacacacacgaatcaataataaaataaatctatagatgttttagtatatgtaaatcatacctggtttaaaagtttaaccatctttaaaagtttaaagtatttgcacacacactgtccttttcatgcatcattcagctatgtctaaggtttggctccttgtgaagaacctctctcctctcttgggtttttccccttaacacgtctggtctaggaggaagcacacgatgtcacagtgatggtggaggttgtatttgtcaggttcctggttgtttcccaagttctcagaagctgtgcagaattagtcaacaagtaccctttgggtctctcacacctcactgtaaaatgattcctcttgttagtgtgtaggtattggcatccgctcctgggggaatgtggtttgtactcagttaaaacatgaataattccatcttcctatgagagaccttcaggatcaggcatgcgtttgccacagagtcacttgtctctttgccatggccttggcttgtgtcatctgtttattgcctatgtcttcgttgaaaatacaggtgaatgtgtaggtcaagggttggagggacaacacataggcactgtctttgtttctttctgtttaaacccaccacagagtacccagtaaagctgtgtgttcccacagttagacatgaccttcttattacagctttgcctctaagttaatgtataattctctcttcacctcgcaacttccccgtggcactcagaaatgtgggcaatttgccactctttactttaaaaaatctcacccctttaattctgtggctactttgcctttctccatggtggtgatttccccacaacgtggtccatggctcttttctgtaaatacaactattctagacaggacttgtcttctcatttccctagatctgtgtgcttctggcttagtactaatgatagaaaaagaacactgagagaaactggtttgaaaaaaggggagtttatcatgagttatttaaaaatattgcccatataaccagaatactatataaattttcataaccagaatacatataaatggtcaaaacaccagtcagaatgacaaatttcatatttcttaaatactagcaaagaatgaagccaattagagttttcaggcaatgctcaccctacgaggagacctatataataaggatgtacttagttcagggttctggtttggatatgaagtatcttccaaagaggcttatatgtttagggcttggtcccagccagtagtgcttatggagtgattggctcatgagcatgctaacttcatcaatagtttaattcatcaatgtgtctgtagatgaatgggctcttagcaggtagaaagtagtagcaggaagcttgccgctgggcatcgtgttctgtctctatctttcttggtatgtctctctctgtctttgcctgtctctgtctctgtctctgtctctctctctctctctctctctctctctctctctctctctctctttctctctctctctctcctctctcccttacttcctaggcaatatgagatgagcgatgagccattttggtctatttcccctacctgccatactgttctgcctcatgggaggctctgccttttaagcaatgaaactacccaaccatgaactaaaaccatgaattgtcatcaacttttcctcattgaacttgtttttctcatttgccacatagacaaaaagctgatatactacaactggctacctgaattagagactaggtctcagtagttcagtgtcctgtttttgtaagttaggaaatggtggcagagagggagtgactagggtcacactactgaatagggccgcttggacacagtcatcgcgattcccctctcagcagttttccatcatagcactttccctccgttatggctgcacagcttatagaggaaatatactgctaatggggaagacactggcaacaggagacgtgggagaaagaaatcagtggaaagtgactgttcagagcttccaaaacaggttccagtttccttttggctagctgctgatgcatgaattcatgcgttttctacagataaaggaagccagtttagaaaactccagggagggtaacaggaaagagatgcacccctcctcaagtgtggagctttatatcaaggttactgagtgttagcaaccttttgcaagtgattaaattctttaaagtaacaagaggaggaagtgaattggggctaaattccaatttgtactcaaagggatagtttcagaaggacattctaatagtttctgattgagaaagtctgaagccagaataattttatatatataatatatatatatatatatatatatatatatattagtggttgatgtaaaaatgcaataatttagagaagagttgcacgatggcagttctttgcttgtttacagttttagacatactggagagtcagtaaaagatttccttgctgttttttggcaaatatcagatgggttaatcatttacaaggacgctcaagttaatatggtaggaatggctggctacttcaaactctccaggaagctagcttcgctgtgttgaacctgcgtgtttcatccagaagacatatctattaactgacctgctttgagggaaacttgaatgcactgttttgtgatcaagaataaccataattctagcattgtagggtccccttctctcttaccttgtcacattttagtagtgtgtggacatcttgttgacagaaattatttgaaatctccagggctggtgtctaactgtatcatttgaagtctgctgagatacctgtggccatatgtgtccggatgcagcagcatcaagggagtctcctctgaggagaagcaacaccattgtgaaaggggaagggtagcattctttccaaggattgcactttctgggagaactgtgcgggggttgaatgctcccagaagtgctgctttgccttctttagtcctggtgaggatagtcgttgcactgtggtcatccctgctctatagtcatccctttgctatggtcatccttgtgctataatcatctatgcactataatcatccctacactatagtcatccctgtgctatggtcatccttgtgctataatcatccctgagctatggtcatccttgtgctatagtcgtccctaggctatggtcatccttgtgctatagttgcccctaggctatggtcatccctgagctatggtcatccctgagctatggtcatccctgagctatagtcatccctgagctaaccaaggtcatccaggttaactttgactcacaggagacctccgtttatcatgttgtcactatggcatggtgaggattgttgcttaatttattcagacttacacaactgtgtttgctttttaaaagatgtctttttcttttaagtaaggtcgtgtgccattgtgccactgtaagaaggcaagagaagtgggaaagacaggctttgatgtaggtgctgggaaccaaacccttgatgttgggttatgagcctttgcctttaatgactgaaatacctctccagccttggacttatacaattttgtattttgttaatgttccttatgagcagatttttaaaaattaaactgtattacaatatattaattgttcataatgataagtttcataaagacaaaatatatcatgtacctacctttttttcttctccttccttcctgctagcttctttctccccctagactagtagtttccgtcctgttggtcacgacctatctagagtccaaacaacctttccacaggggtcacatataagatatactgcctattcgatatttccattctgattcataacagtagtaaaattatatttatgaagtgacaatgaaagtaaatttagggttgggggtcagcacagcatgaggaactgtgctagggtcataatgttaggaaggtggagagccattgctctagatagctccactcctactttcatgtcacacatggcctgcaaaatcttcgggccacacatgagagaaaacaagcaatctttgtgctttgtaccacagctactgtgtccattctatctcctgatggatacctgggctggttccactacttggctgttgtgtacagtgttcaataaacattcacgggcaagtatctccataatgtgctgacttacattcctttggcctggtcccacgagcggcacagctggatgagataatcattttggttttattttatgaggactctccatgagtctcacagtggctgactagactaattcacattcctgccaacagtgcatatggcttaatttccctctccattgtcaccaagattgattgttgctttcttgatggtggccattctgttctgactgggacaagataaggatcttcgtgtagtttgaaattgcatttttctgatggcatgaagaatgttgaatacttcatcctttgaaaactactttttttttacttcattttcccatttaatgatttgattatttagattggaggtaggtttttttagttctttatataatgtcactattaattctccgaatgatttataagtatcaaattttttctaccattttgtggactgattacttgattatttcctgtgctaaacgaaggccttttttttaaaaaaaaaaaaacttcatgcaaccccatctatcaactcctgattttagtccctgtgttattggagacttttgcggaaagtctttgctatgcctttatcttgaactggtctccctgttacccaataataatgtcagagttttgggtcttacagtaaggtcttacttatttttgaaacaatttttttttttacaagatgagtggttgctatctagtttcacctctctcaatgtggctacccagttttctcagcacaatttgttgaagaggctcttctttccatgtgcatttttatacctgcatgaaaaatcaggtggctataagtgcatgtgcttaatttggggtgcgctttagtactccattgatatacaggtctgtttttgtgccagtgactattcatgtggccctctggtatagcatgaagtcagatgttggaatacctccagcattgttttctttgacttgtagtacaggtactttgtgtagatggaacagatatagtggtatatttatggctgctttctatgatgtataagccttctttgccctgtgtctgaatccttataaaagcccagggctatgtaatgtttcctagcctcattccttggcttgactgaggactgagtgtcacgttagcaagcatactgtattctctctcccttgctggttttccttcttttcagcagtgatagtctatgctctcacaatacaggaatgtctggatagaaagagcaaaggttatgtggttcttttgatatttgagctgctattacatctttaatgttgtcatttttgtaatctcagaaataaatgtaatactttgatatgtaaatatatattaggttatgctagcatttatatctaagaattaaaattggaggtgtgtcatagaaatcatattaatgtactctcttcacattgcctgtttataaggtttatattacatcagatacatatttttggattaacataagctactgctgcaattttcttagggttttgttcataaagaattttctgaagggatggcaacttctcaaggattgtgaaaaaaacagttttacatttaaagaaacttttaaaaggacactaccagtctttaccatgtctcagtagtcagagttataagtaatcatattaataggagagtaataattacttatgaggtgaaaatgtatctttggacatgacaatggaataaaagtatgtccttgttttcactttagatggccagtaacccctgtgccaggtagcattctgtaccaactttgaatatcaacaggaagttactgggtagcaaactttcaagattataacgtactactgaagtaacttggaaagagaagaaaaccagaattgaaaccatggcgaagataactagagttgggtcagcatcccctccagacggaggctggggctggatgatagtggctggctgcttccttgttaccatctgtacccgggcagttaccaggtaagtggatctttctttcttcttgattcgttaaggatgagctcatgtcatttcttgtgcgtgcgtgtgtgtgtgtgtgtgtgtgtgtgtgtgtgtgtgtgtgtgtgtgtgctcatgtatcttttttgctttgcaagttatgatactacagtgcttcagagtcctggatattggcctcttccctaatatctgatatatgttaggacacttaggagtttttgaatgtattgggcaaaatctaatacagatatgttttcatgaatacctctatagaatgtggaagtgtgtgatacttacttctttccacttttcatattacacctatttttcacataagctccttctatataaaataacatgagaattgttctgattttttcatcagaagaggatttttccatggtattttcataaagaaatcagttttctaaggattttcaagaattgctaaatgcatactcaagaagatcaagttagcataaactatgttggctctagggatatttaagatgatctttataggtctatttttcttagatataatatattaatgagaaattttaattaggatagtaataatcattaagattttataatggaggcaaatacatttatgattcctaactcataaatgagaaacactatagcaagaaattatagtgtgcaatttatcttcaagcctgcagtataggaataaggaaaagtatgcccatgactaagtgtagttacaaagtttataataggtttgtgaacacagtataattgaagtcaaacttgttttatttttttaaagtcaaacttgtataggattagaatctatatcctctcaggaggaatactatggaacttcagagaatccatgaatacccttttgttttttaagtattgagactgggaagcatcaaacctagaattcaaattcttgtgcttcactttgtattttgactgtggtggtggcaactggattttaagttgaaaaacacaactgtaaaaaaaaatagtgactctttcagcctctcttgctcatttgtttttctttcagaggcctgatgctcaatatacttaatatccaacttgctctttttgtgtatttaggaactaatatttgtgatatgcatgtgacatctccttccccacttatgttcaagtggacctgagtttctcttctctgacagtatattctcgatagtataagaaagtatttgtactaataactttatttgatatcataaatgaagatattgatacctgtccatcaacagatgtagtgtaggtgtttatatatttgccaccattcaagtttgttggttatatgtcctaacaaatcatggaattttttcaaaataattttatattgagtctgattttcttccttctgtattctgagtgtgagtaggttgcagaattaaaaaggaattcttttgtgtagcttcttataaatgcaaacttctattagttgcacaagaggaaagttcaggaagtgggctcattgcattataaggaggacttgtgctgtagtattctggatagttgaggcttcatgaggaatttgtgttctcacaaggttgtccacagtgatcctaattgcaatactaagattcttctgtcaatcatattttttcacatgagctttgttatttaggcaaatagggatatttatccctgcttagtggcaaggctaagtgacctgcctgtatttatggctcccaggacagagataaactgggatcttaatttaccttgttttttttttactatagtgcacacactcatcatctacagacacttgagttcacacacacacacacacacacacacacacacacacacacacacacacattcacagaaatcactattgttttttctagaatataatttcttatcctattctcacaatgccctacacttctgcacccccatacatactttgtagcttatcttcagttccattaaggtcagctgtggtattagacactgactttttaaatgccttggttacaggaaatatcttctgaaggtgggcaacttcctctccaaggataatgtttattattatcatgccaatgataatggggatgcatgcatcaaggggatgcatctctctaaatttctaaatttgttttccagagggcccctaccttctctgttctgttgttaatatgccatataaggtattacaccaattcctgtacaaacaactccacatgagtgtgtgtgtgtgtgtgtgtgtgtgtgtgtgtgtgtgtgtgtgtgtgtgttcattgaactttctggaactacaaaagaactagagttggagtccatatgtatttgatcacctacatcaggagtttggaagaccatcagtaaatgggggggcttgtcttatttggcatggtgttgaatctctgactaccaccaaaggctgaaagcttcatatctttttaggttgtacttttatgtttcatttttaattcacttaaaaccagttccattgatgattatttttcatccattgaagacatgactctgtactagaagcttctacaaccatagatatactgactatcttatggtagactcatgcacaattaactaaactactaataaaatcatccatattgaccaaagttatatgaagtttgatgactttcagtggtaggtagtcaaggatcaacaccttatcaaaaaagacaagccacccatttacagaccatcttcaaagcccctgatgtaggtaatcaaaaagttatattaacttcggtcaatatagacttaaaataagattttcattgagacaaattcaggcctggattgttcaggataggctttctagagaagttgtccttggactgaagccttaaggagtggaaagaatttggaaaatataaaaaagaaagatgtctcaacctgcatcagtgcctccccttcctcagcactcctaaactgccaagaatttagtcagaacctggaagagcagactgtgactggcagccaaggcagagtaccaggggtcaacaggagaggccaagagaatacttgagcagaataaaggcagatgagaaagtatggtgatgtagtcaacctggcgatctaaatgtcacaaaccaagaagcaacaaagagaactggagttgggaacaaaaaaatgcaagccaggtagtctgtgtaatagataatcagtgtcttcaggacaaccatgctttgattttctatttaaaaaaatacatttcaaaacaaaatatctcacattcagatggtaacattcaaatacattggaaatatataaagcattttttcttccttacttcactgcctaaaaactaacatcagcagtatttttttagttaagtctcaaaattaaaacaaaaagttccctcaatcttgaactaacacaaatgtatgttcttgttattgacatacgcaaggttatatggatacagaatcataaggagggttctgatccccttaataatttctcttgggattgttccatatcaacaaacatggttataactcactgaaaaattgttgcttaaaattctgtcatatgctgtgtccacaattattcgacacatttttattaatgggattttctattgttttctgggctcttctgttatagacaatgttataattatgatccaaggcatttaaaagtcctatttcagctctggacttgtactttgcaaattttaaattttaaagttccacagtccatggaagcagccattattgtttacttatgtcatgtttattaatatgcattgattatttctttttccttataaaaatacattgtccgtgtaagaatcatatttgaaatgcaattacatgaattatattcctatactggcaacatgagtggatacttgagaagcaaaaattttatttaaatattcaaaggaatcaatatcataggttcaagacttgtttttgcctagattttctgggtccaaataaacttagttgaaatgaatttctggagttctttggagtttttcagctttttcaaagtctttttagaacagttggggccaaaaaaaaaaaaaaaaaaaaaagattgccgactttactgagcacttactttgtgcttgttggcatgctttccaatagtttttatatactcatttccaccacattacaggattagtcacggtatatgacagtgattttgactagtaggctgtaactccccagtgagtcagttcttgagctgactcaacagataactaaatcaacctagatatctatttaccaagccaagtattagccatcagttttgtaagagctaggacagtgttagagccatgatgaaactgacacagcaagtgtgctgaccagttgagtcaaatcatctttaagaaagcagttttggtcatcagtgatgatgcttgttgtgttttgttcccacatttttgtgaacaatccctatcaaaccctcaagaactgaatagatgccataagactcatcattcagacttttgtgaattatgtttacaaaagtgcttgatttatagatgatgaaattgaggccctgagagatcaggaacttgccttgaagactgtttgcctgtgcgatgactctggaatgggagttttgctttcttgactcctgttattacacaggcatctcagacatcaaccacacaattcagatgcatgtgtgttcctgttggaattcaatttcggtaacatcaccactgggttttaaatcttacaacacgaacttccaccatctggaaagctctgcagtcatttctcccaataatgtggaatatgaccacattattcctttttgttttattttgtcatttgtaactgggttctcttccttctgaatgacataatccatcttcctgaatgtcatgatcatcgaagtgcctggaaagacgttttccctctggcttaggcactcatgtgcccagacgtgaagctcgtgtctttgattttaatacccaaagtttcactgatgcgactagtcaattcagttcaggaaaccagcaagggaaaaacaagataaaatttcaaaaaaaaaaaaaagtcacaagagacatcacgttgatactaagttcccccaaatgacctagcgatgacaagagcctgtcgtttctaattataaaacagctcgtcatccctcgactgctctgtgctctcacgctgccaccttctgcaccggatccggctggtcctttctcttcagagaatgactggatgcttcatatccctgcttcagctcacctccatgcatgcccacctgttggagctaccagccactcttcctcttctctttctgttggaccatttcatttccttacattccagtcaacttctctatcaagtgactctccctccctctctccctcctccccccttccctcccatccttcttccttcttccttcttggttctctcctttcactgtctcctccccttcttccattgaacaatgtggcatacactatattagacgtttggtatttggtgtgagttaagacagatatgtcttctgctggcactgagcaacagctagtgaacagtacaaacaaatgcaaagggagttgccatacctcgtgctaagcatgcaagtagaggacacaaaggagaagcatccgttcctgtcttaagtagtaaaggagtaatcaaggaagacttcttggaggtgtagactggttgacagcctgagactacaagagggagcttagaggagaatcacagaaaaaaataatgtttagaagtgcataaaacacagggagagtatggaaagaggcagaaaagaattcagtacggctcaagtgacgtattcaacagtggacagaaaggaacacgaacaaaaagggccagctcggtgggagtgccaacttgtgcagccactttggaaatcagtatggcgactcctcaagaaaatgggaatcagtctaccacaagatccagcaattccactcctaggcatatacccaaaagaagcacattcatacaacaaggacatctgttcaacgatgttcatagcagcattatttgtaatagccagaaactggaagcaacttagatgcccctctacagaaggatggatagaacaaatgtggtacatttacgcaatggagtactactcggcagaaaaaacaatggaatcttaaaatttgcaggaaaatggatggaactaaaagaaaccattctgagtgaggtaacccaataacaaaaagacaaacatgatatgtactcactcatatgtggattttagacatagagtaaagaattacgagcctacaatccacactgccagagaaactagtaaacatggaggactctaaaggagacaaacattgtctgctggagaaggggaaagggtcaagatcctttgagcaaattgagagcacgggaagaggggggagggagctatgagaatgagaagggaagaagaggaaggatgcagaggtcatgagggagcagaaaggttgagtcaggtgaaggatagaagaaagggtatgtgataggtagggttttatttgtggggggtgtagaagaggacaggagggagaagggaaatgggattgtcatgtaaatcaatcttgtttctaattcaaatttaaaaaaatgataaaaaaaagggccagctcgaataatctcccaagtcaagctaaaatgtttgaaatggcagtatctgctttgtgttccaggaaggtaatgctgtcactgtttgaagaatgctctgagggcagtcaagtgtgaattcagaagcatcagttaggagctttgagctacagttcagggggaaggcgctggcatcagatatgaacaataagagggacttagaccggagctttgagctacagtttcagggacaacactgttacggacagtaagggggactgagacccatgaaagggtgtgaatgccctgcagagggattggaaaacttgatgattaaatcacttgtcagcaagcctcattttggtttcaaggcttattagcagtgtctggagacatgtggagcagaaattggagatgctgctaagtatcctgcctgccacacaggacaaatccctcaaggacttacccagccccaaagtcaatagtgttctgctcagaatcctgggtggtgggtaacttacctatttcgaaaatgaggatgtatttgttaaatcatttttcacttatgttgaaagctgagtagttaggagaaaaataatagacattttatgaccagaccagaagtcttttgtggtaaggaacttcacagggttttgttattgcttttagtatataggtgtttatttttctgagatcattatttcattattgcatgaagtgtttcagtgatgctcagctccattcatcttccccacctctctgatatccctgacttccctgtgtgctgtcccctatctcatcctcttttgtggtccatgtgtccttctcaccttccatctttcctcagtaccgacttttaccctctcttggtctccttttaagctttctaggccttacacacatttttatctgtttatataaacacatatgtacttaacatattaggatccacatgtaaaaagcatcaggcttttgtccttctgagttgggtcaccttgctgaacattatattttccagatccacccatttcctgcaaatttatatctttgtagctgaaatcccattgtgtatgtgtaccacattttcatcattcgttcatctgttgcaagttccatttccttgctattgtgagtagagcagcaataaacatggttgtgaaaatatctctgtggttgacctggaatttatggggcatatgcccaggtgtagtataggggtcacatggtagttctattttaaatattttgaggagatggcctactaatttttatcatgcttgtactactttacactcccactaacagtgagcaagggttcctctttcccacacccttaccgacatttgctgtcagatcgttggctgagatgaggtggtattgaaaagcagttttaacttgcacttccccgaccaccagggatattgaacacttttaaaaacacttattggtcatttgtgtttcttcatttgaaaacttctcatttcctgaattcattatctgattaccactttggattttgtgtgtgtgtgtgtgtgtgtgtgtgtgtgtgtgtgtgtgtgtgtgtgtgtgtgtgtaatttctgcagttcgttataaactctgagtatcccctccccacccccgtctaaaacacagctgatgaggattttctcccattctatgggttgtctgtttgctctgctgatagttttcttttgcaggatttattagtgagtgttctggagatcagtatctgtttggggaaggaagcaagatagacagatggattcttgttgtatctgggttgaagggctcttgtttttcttgttgctctgatttcaaactggcttaatatagttatagttaattcctgtttttaagaagttctgcattattttaactcaaattaaagtcatacagtcatattttcttttttttcctttttttttttttttggttttttgagacagggtttctctgtgtacctttggagcctatcctggcacttgctctggagaccaggctggcctcgaactcacagagatgtgcctgcctctgcctcccgagtgctgggattaaaggcgtgtgacaccaacgcccggctcagcccttacgtttttgagttaacattatgttttaaatttatttccaaaccattagatacagatcaacatcatttaaaaatatttaataaaatactattttaatttattgatacatcataatttttaatcagttttgtggcagttttaatgaaatgacccccatagactcatatatttgaatgctcagtccctatttagtagaactgtttgggaagaaattaggaggtgtggccttggtggaggaagtgtgtcactgggggacacactttgaggtttcccaaatcaccctccccagttctctctctctctctctctctctctctctctctctctctctctctctctctctctcctttgtgcttatgaatcaagatgtaagctctcaactcctgttccagtggcacacctgctagcctgttgccatgttccctgtcatgatagttgtggactttaactctttgaaactgtaaactccaaataaacttttgtctgtaagtggccttggtcatggtgtcttattacagcaatagaaaagtaaccaaggcaagtcttttaatgataaacaggtcagttacaatattcagctataatcaattgttccttagaatatattcattgcagtacatctatccctgtcatctttattgtcatgagattactgcctttgtacaaatattagaagtaaaatttccaaggcttgtttttatattggtcttcattttgaagtttaaagttgtatatcgctttagtgaagtaaaaaatactagtactaatatttaataataaactatgctcttaacatgttttcttttatttccacaacaccctctcagtgcagtgatcttcttatctctgtggtttcagcagcctctctggtgatggtgcacttcttttctggttcctcagaatggccccaatagtcaactcctggtttcctactgcctgtagctcagtagctgaaatcctttgaaactgcagcagccaattgcaacaattttaggttctgattcatttccatcttcatttgtcttttgtataaaatgcctgcattgtgtttttcagatgtatctccattttctttgtggagttccagacatactttgctcaggattactcacaaacagcctggatccattccattgtagactgtatgacaatgctctgtggtgagtattattgctggatactatagaactgagtgtgacaatgacttctgacagagccaagtgactctgttttcattattagttttctaagtggaagaactatattacaatgttacaagttagttaagactgaaaaactggaagttcaatctcatctttgggtaaacctaaaaaacttgcctttggaattgatggccttgactaatgacagatggagtagttcatcaatacactgggaaagacacaaatcatttgactcatctggatctgagtgccatggagcttgtgatgatctggagaggaatttctacgcagaatgtacatgatttatgtcttccaaatttgacagccttttcattttctggtcgttcaagcatacattgaacactacagtaagccatttttctcatccgaatagtaacaggcaccaaccttgcttaacttccaagatttaatgggatcaagtgctttcagaatgctatggtccatgagccgtttctatatagtctccttaaatgagagccaacagtgttggatcatatctcaagttttgcctttctttctgttcctttcccagagggttccatatttaactcatagatttaatcttttcttgaataagaaaaacactgaggaaggataggagtgtgtgatcaaaagctaagcatgctcactgtggttagaacttcatttataaaacttcaaatgtgttctttatgacatggatgggttccagaaatcatgagaattaacactgcatctgtagtagagggtgaaaaacttttctttttataaattttgaaccaaagttactgactttgtttactagtaaacttgtaaagttacattaaattggcacaatccgtttctagcctggatccactctatcctttctttaagataaatccaaaaatgctttaggaactgtttgttgtctcttgagaaactttctttaagataaatccaaaaatgctttaggaactgtttgttgtctcttgagaaacttatctggggatggaaagatggcccagtggttaaaagcacttgctgctcttgctggggacctgagttcaattcccagcacccacatggcagctagaatcatttgtaactccagttccagggcatctgatgccttcctctggtctttgttggagcccatcacacatatggtgcacttatatacacacagacaaaacatacatacacaaaatataaaataaataaatctaaaaattttatgtttctctggcaaaagggaagtactatagtaatcaataactcatgataaattcatctgactccattataggtactgactcatatgtacttattgttaataaattaaattttgttatatttttcatcattcttaataattttaattagggaaaatagcacatttatttttaaattctacatttaggaaccaatggtttgtgttgaagtgtatttctgcttcaagggttgactgagaatttcttgaaaagactaagtttactttttcaacttaaaagtattaagaaaaccatatacttggtttctgggtgtagtcttcccccttctccttgagctagcactggattttcagggccgtgttgttagccacagtgttcgtatcagcaggcctcagaggatatgcatgactcatctccctcaatgttatcttctggagaatatttgtgattctctacagaacaataacaacgtagtcaccatgacagtgtaggggctgggcaggggaaaaaactgactttatgttcagtgtaagagtgcgagtcttgctatacttgtctgtcccgcgcgctatatgttctcgccggcaagaaatacacgcaggacactcggatccttctgcagacaagctttaatgcatcttgagagtggagagagcataagcttaccagagcggagaccctgaaccaagaatcccattccttaataaaggctggcaagccgcctgggacgtgttaccctatgaatggcttcagctcctcaggccaaatgagccacgggataggcagagatcaaaggaatggagattacccagcgcctgtgaagtaattgacattttggtgtcttcaggcaccattattgtaatggagaatgcaggaacggctccctacacttgtctacatgcattcccctgctcacagaagttatatactgtgagaactgagagcatgaacacgagtctgtaaagctgcactgagacatcccctgaaggagatctgccatgtgatgaacagagaagtaaacctagcttgttgaagttggtgtaacaacctcatcaagtttggtttagattatgactcaaatgttttcactttctagtaaccatagtagcagcacccttgagaaggccacacagtctctagagatttactctttcccactctcccagagttaactgtaactggtaggggatgctggccagtaccagagtgtagcatgtatgtgtgagtctctaattttaacttgatccatacaaaactaactattaaacagatattcagggaatcagctgttttgattttttctcccccaaaataaaaattcattcattgtagtactactttccccaataacacagagatgtattattaattatgaaagcttggtcttagcttaggcttttccccaacgagttcttataacttaaatttactcatttttattaatctgtgttctgccatgtggctcagtaaccttgcctctgtatcaaatgttcagcttcttcagtgtctggctggcatctactgctgtaccggattctaaccctgagtttctctctgtccagaggtcccgtctattctctcctgcttaaatattggtcattcagctctttattaaaccaatcgcagtggtacatcttctcacagtgtaaacaactattcagcaacaactcatcaagtaactgtcatcattactgttacattataaaagcaatagtgtatataacatccttgagcaagtgaatgcaatttaaataaataattaatctctgtgtaaaaaccaccttaggtctggagagataagctcagcagttaagatcacttgctactcttatagaggacttatagagggttcagtttccagcaaccccatgacagcccacagccctctgtaaacccagttctcggggatctgacaaactctgttgaccccaaatggcaccagatatacacatgatgtataggcatatatgcaggctaacattcatgcatgtgaaaagtaagaaatacaaataaataagacacattaaacaatattaaataaataaaaacaataaaagtaaataaaaacaaaaaccacactctagttcaggaagtataactataagagaatgaagctaagagtaagaggtgagtctaagtcagggcatttcatctttgtccctgccctgctcctgttcaggtaacctccaatgggtcacttctccatgggtctcaatttccacagttataaaactagtggggtggggttgatgtttcaaagattgatggctctcttccctgtcagtacaacaccacaatgttttcaaggtacccctaaagccttcctttctattgacctgcctgttgtttttgaagctccacttgggagcgttgtcagtaaccacttatcctgtcaagtgggaatcatgctgggtggcttgctggcatctactggtttcatcctgggatcatttgccaccagcctgaagcatctctacctcaccctgggagttcttacaggtgagtacattttcttctacatgcctggacacaccttgttcaggtgttgtcaggcacataaacaaagcagagatttataaaatattcattttgtgagatgcataatgcagctgacttagctaatggcggcctacttagcagttacacagagttggatgtgtgatttcactacactagtgagactgcctcaccacattaattcagtcatatggtgaaaaataacttttctctctggaattacatatgcctgagagtctgtactcagaagaaatgataagttactcagcacagtacagattttcaacaatggccattctccagtttgcctttgctaagacactaagtaaacactgttcagcctgaggtgtcctggctttattttgagtattattatccaataagtgggaatttcaatttgggaaagatagcaccttgccacagatattctcatatttcacgttctctcagtgttatagaaacatcactttagaaaatcgtgatggattttatggaactagaagaacatgtacattccagtagctatactttaaggggactgcataagattgaatgaagttggctggtggaaccaaagtggcattctgttcatcactgatatgggcatgaaaaggggtacccactcctgtctggatactgcactatgagtgtagcgtccattaggccaccaatgtatgtaaccgcatagtgagtgaggctgtagctatggatctgtctgctaaggaaggtacatatactgagtaactcaaggggcctgactgctaattttactaggaactagtctggttttagcactgaaagtcccacatctggaaactcattgatgtgctggccatgacagtgggtgctgaaagtggttctcttttaacttctctgtcatgatcagtcttttggtgtgttgaagtacataacctacatgttctgaaacctaggcttaaagccctttagctttctaaattaatctaaggtaatagaagctagataggttctaaaagcttttgagattattggtatttttcttaaggccgtgaggtatatttatttccaggtttcatattcctgtgtaaaatgtttcctattctatgacgcattccacctaagggaaattattctgcaataattctcatggatttgtacgtcctatttctgtgcaaatatggagtggcacgggcatcatcaaagctctgtcttctcagggaagggaagagttgaggcaagttttcagctaattcaacccacaaaaacatgcaggggaggaagggagagggggcagggcagaggagggaggaaggaatcagtttcttggttcagtgttttcgggattttgctagtatattccagattagcttgaacagtttttttttttcaagttcttcattttctcttctttgagaaatcatttcttttagtgtattcttcctaagaagaatgccacgtaagtcctgtactttgctagtttttggatgactggcagaagtctaatttctcagctgggtatccaaaccgctttaaaggggtttcctggaaaaccagattctcttcaatcgcagccatcctgttccaagacacgcccccccctcggtgctcaccatgaaccagcactcatggcgttctctgtctcccaggtcttggatttgcactttgttattctccggctattgccatggtcggcaagtatttcagcaggcggaaagccctggcttatgggatcgccatgtcgggcagtggcatcggcaccttcatcctggctcctgttgttcagctccttatcgaacagttttcctggcgaggggcactgctcattcttggagggttcgtcttgaatctctgtgtctgtggcgctttgatgcgtccaattactcttaaagaggaccgttcgggtccagagaataatcgttaccatggaacgcagagagaagactgtaagcaggcatccccctattcacctcagaccaaagaatgggcacagacctgtctttgctgctctttgcagcaggaatacggttttttactgatgtcggacttcgtcgtgttagccatctcggttctgttcatggcttacggttgcagccctctctttgtgtacttggtgccctacgctctgagtgtcggagtgagccaccatcaagctgctttccttatgtccatactcggggtgatagatattgtcggcaacattacatttggatggcttactgacagaaggtaaaatacaaaatccctgaaaacacagctggtttctcctagcccccagtgttcactgaccttaccttgttatacacctacctacctttgaagggtaatttcaatatctgaagtcagccttcttgctaattcttagagatctgattttggcaaacttttcttatgtaaaggtacatcgggtaaacgttgtttggctttgtcgaccatatagtatttgtcatgacttcccagggctgctatggcatcacaaaagcagctgtgtactggagtatccatgcacattgaaattttatatatttcaccaatttttcccctgtttccaaccatttaaaatggggggggggcaggtaagttacacaaacagagaacaagctagatgtgaccctagatgtccacccttgttctagattatctagattgatgagtctgtctgaacagcacagggcaaggaccgctgaaagttccaatgacactttgaattccagccgaaggcaagtcagtcctccatttgagacaactgctggtcagctgctgtggtttaaacttgttttcaatcattccagccatcatctagtagcagaaaggggagctgaatctagtccaagtgggaggctcaggtacaacaacacacattgtctctagccacatatttagctccaaatgccggaaaagaataacttcataatactgtaagcttagagactaaatttataggaaatctacagcaaatccaaattacctgtttggactggagaatgcaaacttctaatggtgtcctagatgagcaattctttacatttgagttatgacttaagagatctatcatggcttctcacaaattatgctttgggatttaatcaggatctgactgtcaccttctagcattattaattatatggtattttggatagcttgcacttgttttgttttgtgcttggctggtgataagaccagcacctcctgttcaggacaagttcacagagccactccctaacacttccacattgtaaatgaaggacaaaggaaggaggaagggcgatgtcccctgcacagtgatgactcaggcagaagcaacatgtaagccgaaggaggcatggctaaattcttaaattctcatgccagttctgtgcctcattaacctcatgacccagggaaaatcacctagtgctcagatgctcaagggctccatctgtctaacaggtcagtgcaatatttggaggataataagagaaagcatttgcaatacagacagtttttcatataattggtgtcttggaaagggatggaattgcagagagggggtgtagtggaagtgccattggagaagtctgcagatacgactaggccatcatcactcttgcctttcattttaatgagacttcacattccagtctcagcaatggatgatcagttgagtcatggagcatttgtgaagtgctccataccaatggctaccacatctcaaagaactcaatatggtagatgcctagaaaattgtagcctcctgacatgctatgtgttatttcacagccagctctacatatcattgaagtagatagtcttgtttgatgatgaaagaattttagagttatgcaagtagtgaagttgcaatcttgtgcatatctaatttcagagcatcaccatactatgcttcctacagatagaaattgatttacatatgtcagtagaacaattaaggaataacaggggctagagagatggcccagcaataaagaacatttgccacttttgcagaggactggagttcagttcctagcaccctcactaagcagttcacaaccacctggagctccagctccagggaatacaataccctcttctggcctccaatagaaccaattattgtgtgtgtgtgtgtgtgtgtgtgtgtgtgtgtgtgtgtgtgtgtgtgtgtgcgcacgcgtgtgtgcatgtgtgtgtgtgcatgtgtacacacacacttaaaagtttactctttaaaaagaaaagagcagtcagaaggtaacaaaaataggaaggtacctatgtaaacagcttcagtgcttacaacttcatggcttggtgcaaactctcgtttgtagaacctgtgtgtcccatactcattattgttcttcccatccgtaggtgtttgaagaattaccggtatgtttgctacctctttgctgtggcactagatgggctgtgctatctgtgcctcccaatgcttcaaagtttcccccttcttgtgcctttctcttgtacttttggctactttgatggagcctacgttaccttgatcccagtagtgactgcagagatagtggggaccacctctttgtcatcagcacttggtgtggtatacttccttcatgcagtgccatacttggtgagcccacccattgcaggtaagtgttaaaagcttgctagccactgtcatcatgttgatgtgggagaaatgaacacacaactcacatgcaaaaagactaggaaaagcttatccagtgagttagagaagagtaaaagacaacgataataggaatgcaagagtcgcccaagtatcatggccctacccactttcttcttttataatcttttcccaaccaagtaaggatggtggcttgcctggaaagagaaaggccccaaatcaggttcttggttccagttcatactggaagtaaaagaatagaacatttgtcccgattctaattaagccaggcacattcagaaggaagcttccttccgaaatggaacagtgggtgctgaggccaaaaggcgaagcagtggcctgatggtgcagctctgagagcctgacagccgagaaagctctgcgtgctttcccctgcgtatgtattaaatgttagaaattgtaagctagagatttgtgacacaggggattcagattccatttgaatgcaacagaaggaagctggtaagtgtctattgactttcaaagtgactactttggtcctatagaaatccacacatgaaacagactattaaaaaaaatgtgtgcagggagcactgatcatggggaaactttgtagaatgtgaattaatttttacatacagtttgaagtgactgaaaagagaagctgtgtgctttcctggtggattttggtggcgtatgagtgatgttttgaggaaaaattcaaagatgctccttgtcgattacaaagaaacttcctgccaaagtacataccctactcattctctgattcttgtgacccatatttttcctgtcatacaacatggttgtgctcaaattttgtgtctggctcagctattgggattggtatgttgcaatagcaacatatctgtgattatatatagttgtgtggcctcaggtgcatacatttaaaacaatacacatcaccatgttcagcagatgatcttagccaaaaaggccaagaagcaatggtccaaagtcctgatatttgaatgggatgtgaatgaaattggacttcccttgccaactggatactgcattgaagcctattgggttacttaaaatagtgtgtggggtctgggaattctattagcattttgcatgtttacttaacctcctatgtaatgacctcaacttcaataatgtaaatgatgtttaaagttacgggctatgaaatgtaaatttgaatatttttcaccagatttcatggtattgataatcacaaatagctattgtgcgataactgagtacagaggactattctaagtcccttcccttagtagcaattattaatttattttatgaatctccctaatgaatctgaatgtatttctcagttgctacatggtaattttaggccatctgctttttgttcatagccctgatgatgtgctgtagtctattgtgatcatcctgacaaatgattaaatttgggagcaggtaaatctggtaattgaatttttagttcaacaaagtggttttgcctttgttgtaggatggctggtggacacgacgggcagctatactgcagcattccttctctgtggatttgctatgatatttagttccatactgcttggctttgctagaattgtaaagaggatgaagagaacgcagctgcggtacctggccaaagaatcagatcccaagctaccactatggaccaatggatcggtggcctactctgtagcaagggagctagatcagaaagatgaggaatccatggctacagctgtgccaagttgcaaactcacgtgaccaacgtggccttatccctgggaatcttcaagacttgaggccaccagattgttcacattttggaagtattttattttgacagtgtatcacctcccaagaaaatgattaatactatttggctaacatatttataaggggaaataaccaataacagagaaatctggagtagcctagagtttcctcatccaggatttgtactcactgtaaaacttagctccatggaggaggtcacgacatagttgatggaattagctggatttaagggtacctctaaggcataaccaaagcagaggtcactgggcaatagttttgtcatcacaaagctcctgtctctctatcttcattctcatttttaacacaagcactgggctgctggtcgccgcagagctggctccatgatagagtgcctcaagtttcaacagagtgcccaaagaatatttgagactctttgaaaggcaatggttaatatacaacagattgtcttttattagtttcccagtcaacacttgcctcttccaatgggtagacatcactttagagtgtccaaataatcatgaaacactatgtttggaataggttttaaaaggtggctggtagtgtatttcatttgaaactgaaacaggaagctctcttctcagtctttccctgccactcacctctgccactaccacatacttactctaagtttaacacagctcgctgagtgatggagcaacttctccatcttttctgaaatgtcagtaacaccccgagtccccaccttgaatttgaactgtagacacattcctgttaggaatagaagaatgttgacactactccaattgagcagcaattgaattcttgagtcagcagggtgtctggtgggagttttctttgcaaaccagtcattagagtcatcattgtccaaaagagggcttgggggttttcttaacacagtgaggtactaaaaatgggattctgtgctcaccctgttcctttttggatcataattataaacctgactcatctgtttagaagcctctgttgattctcaaaaacccaacttttctgtgaattggaatctgaattttcagattggagaagagaatatggagaaaaaaagaggaagggcagggccccggcttatctccagctgtctcaaatccatagaatttagagtcccaaatccccaatcatgttatatctgcacagaagtagcattatgtaattaaaagcagaatcttaatcattcaagagatgaaatccaaatcacaaggaaacattttgatctcaaaggccatttaacctactgtccccaagaggcttcagagtggcttttggcagacatggtgctgggagaaataacaaagcattgagcaaagtcgaggatggctgagtccttatttgaactggcgtgtgtttgtgtcactatattactttcataatgggataccagcttgatttgatggggaaaacgatccattgcagcttttcaggggatatgaatattctgtctttatgtgtcttgtaactttagtcttgaatcaaatcactttgtcatttgcaattttaagaatattttgtgtatctgtaaaaatttaaagttaaaatgaaatactgtttttggaatagcactttacctccaatgccatttttttctgtcttaaaaatgatttctttaagaaaatatgagtgccattagtcctttgttttcaaaacattgattatagtaaatttcatttatgtgattctataatataatttctctattgtgtttatgaaatattaggatagtgagcaaaggttttaacattttacattaaaacatttcagagttggtttttttttttttttttttactttatacatgcaataaattttcattctaactctctgggagcaacattttttaagaaccagtaagaaaagatgtacaccctggagtttacagttttggcacctatacaaatttttactgtttttttcccctccatctatttaagtggtctaaagtctaagggattaatgggaatgggacattttatggaatgaagaataaactgtagagggatgattctatgccttaaatatttgtttatccaactgtaggttttactttggaactaagtaggaaaacagaagaactgacctaacttctcaatgtgccatttgttcctctgtttaaattagaattttactaatggattagatatataggctaatgttttcctagtgcaaaggcaaaataaaatgtgtttatagtcacatgtttggaacaatttctctttgttagacaagggatttggacaggttggggagggggactatccagatcacattaagacatggctaatgtgattcataaaaacctaagtccttcattgagtctttctagaacactatatatagtgataaacacttcctatatgccctccaatttagtcctaagctaccaccatcttttagatgtggaagctaaggtaccaggtttcctagatctgtagctatttcattttgagcagggattctgtccaatactgtctgatgctggagcctgcatccttcccattgtgactgtttatgccattttacatgaattcaaaagccattagaggccaatgggaattagaggccaaaccagatcctccactgaattctgcctcagtcctctgaatcattacagaaaggaggggtttagatcagcaatttctaagagttccccaggatggttcttgttttgtttgttttttaaactacttccagcaaagtggcttagtttactgttcattgagacaggcttctctttggaagaatctggggtaggtggtcagtgatggtaaggaagtgaattccacctccaagctccccttgttgtgcagtctgctctatcgccagtctatttggcattatctttctggtgctgaggagtgagtctggaagttgtttatggacatgaagtagtatggattcagagtaggtgaactgactgagttcccacacttcagagtttttaagttttgtgaaactccaccaaatatttgttaagagagcagctattagtgccaggcggctgggaaatttcctatttctcattagtacaggaaactatttggtggaaggggtggtgaaatagtaaatcaggacagaaagactatctgcaagggaaaatattttattactgaactttgcagacatatccaaaggttaaaaggaataataaaataaacatgggatgcacatcccttagtatctgtgatggcctggctaccattctcccctttgatgatatgagtagaatatgttaacatgctaccatcatatgtgttcctttaatgcagaaatagctgaacttggcacaataacttgttcagtgctagaaggcatagggagggaacacagtgtcactcatgagttgcattgcttacaaagcatactggaccctgctcttcccgtgggcttggagcctgaatcatggacaaaattttccttcttctctgcccatgccaacatggatatctctacttggggccttgggtaataccaaataagtaaaaatatctgtcactgccattattgctagccagtacttaagatactgtgattctaggaaagaaggaaagctgtttttggttctggaaatgttgttactaaggtcagggcaggatctaagcttgggtcatggtaagtgtctgaaagtgaggggaaggaagttagaggccacctctgcgtggcaccctgaggaggttctgggagacactcctgcactgctcctattagcacctctaagcaccagcctcacctcacaccctatgtggtgatttgaatgagaatggcccccataggctcatgtatttaaacacttggtcccccagtagactatagccttgctgtaggaggtgagtcactgagggcaggctttgaagtttggaaagactgacatcattcacattgtgccttctctctgcttcctgtttgtagatcaagatatgagctcttggctgcagctctcagacacctacctccgtgccttcactccaccatcacaaacgctaaccctctggaacttttagcccagttacaatgatttcttttacgacgtggtctcactatgtagtgctggctgctctagatctcattatgtagaccaggctagtcttgaattcacagggacatttatttttcctatagcacctgattctttttcttcaaaaaacatatcttaattataactacacacttatctatgtatttatttccagattatacccccctcctcccaatcttaaatcagtcttcagttgctgtgaccacagcaatcatgaccacagcaactcttataaggaaacctttaattggggctggctcagaggctgagaggctaagttcattatgttcatcgcaaaaagcatggcagcacccagacagacatggcactggagaagaagcccagagttccacatctggattggtaggaagcaggaagagagattgacactgggtctggcttgagcttttgaaacctcaaagcccacacctggtgacacagttcctccaacaaggccacacctcacaccccatgtgccgttccctgttagtctatggaggccatttccattcaaaccaccatacctcccagccccacaagcttttcaaagaatgggaagtatgttgacttgttagccattgggtccagtgcctgaaatcctgagcatcaaaactacttagtgacataattaatttggaagtcattatcatagtatcaatgatctaaaaggctagaacattctaaccttggtattattattaaccaaccttgggtattaactataatactttaagtaatatgctcatggatacataataaacatgaacaaatcatgttatcaaaaagtacctagtgaatgaacaatgaataagaacaaatgaaaagaatgaacaatagtgctaaagagatctgggacacaaaggcagggccaactgcaaggctggcatgcaggtttcttaaaagtccatactgctaggcattcctaacttagtgcatcgacacagaacaaagcaacagtaggaagcccaacagaaggtaaggcaggcttagagaagggagtaaaggtggttaggaaaggagttggtatcaagacatcaatagctgaaacttgactgaggcctgactgtaaaaatgacacagtgcttaccaagctttctcagctaaatagctatgtgcacaaatgagaagatgcttcagggaggcagcaggccccacagacagagattgcatggcaacagtgaaggaggagggctacacttccccagcacctatagacacctctcagggtgcttttatggacatttttacagtagggatgggccaggcccacaaatcctcaaaaggcaccttcactcagtctacagttggcccccaactcacaaggccttcctaaaaattgatagtgtgttattagtatttttaagaggtgatgagacaagttgatgaacaaatacttttctagtaccatggagtatgtactgtgggggtattacacacacacacacacacacacactcacacatccacacactgcccattatacacacatacacccatacccatacacatacatatacacacacacatacatacacacaaacacacacacacacacacacatacatacatacatacacacaaacacatacacacacacatacatacacacacactgcccatttcacacacacacacacacacacacaaacacatacacacacacacatacatacacacacatacacacacactgcccatttcacacacacacacacacacacacacaaacacatacacacacacatacatacacacacatacacacacactgcacatttcacacacacacacacacacacacacacacactcacacatccacacactgcccattatacacacatacacccatacccatacacatacatatacacacacacacacacacacacacacatacatacatacacacaaacacatacacacacatacatacacacacactgcccatttcacacacacacacacacacacatacacacaaacacatacacacacacacatacatacacacacatacacacacactgcccatttcacacacacacacacacacacacacacacacacacacacatacacacaaacacatacacacacacacatacatacacacacatacacatatatacacacacactgaccatttcacacacatacacacacacacacacacacacacacacacaaactcaaacaccactccatgctatcaagctgtcttgttgacaaaataaactaattcataaaaagaagtttcaaaagctaactggagactaagggtggcacactctggggctccttttcttgcagaagaggacgggtgtggggaaaaccacatgggacagacactttgtgtgacagctcaaggttaccgcggaaccaagaggcacatgacaaatattctagaaaaagggtccacaaagatgtctgggaactttgttgagatttgggggctacattttgattctctgggttgaaatgagggatctttacggcataaggcttacttcaacattcacctctcaacagcaaaaaggaatcaaacaattttctttttaaggagcttcaaaaacataggaatcattttaactttgagatgttatgcagcactgccacctgctggatgtcatgagacatcacaatgcttcaactgtgtgttgagaaaggctgcccctcaggaacactgagatttattgctatttcctagtcttccaccctctgctgtctgtctgtcctgcctttatcctcttacagtgaatgcaggctaatgatgctattccccagccccccttttttctacatcgtgaaatctacaatgtatgaagtgatttaatacgttgataaaggagcaagttaaaatgtgagatgcagcaagtgttggggctcagcttgcatcagtgccacactacagaggctatctactctacactgacgtctctggggctgaaatcgaagccagtcaaatggccctggggccatccttgagtcggggagtgctggaccgggaaactcctagctacccaaggcgataaagagcagacacaggcatcttgtcatttcaggagggatctcagtccatgctggaaactggagtccctggtttactctagcatcctcctaagtagctttccaacagtgggggtgactgcagaagacatctactgtcatgtatatagctgatatcaagtaattcttttaattcaagaggcacctaaaacagtttctaggcaattaagaaagttctctgaataggagtgggcacacctagggcctagatctgtagttacccaaactaggagacactctcgactgaggccaagccatcccgtggcaatttagccagcatctgaaagacaataggagaatcaggctcctggaaaatggagcagaggtttggaccctgagaaactttataattgatcatttttggtccctgacaagcaaggcagtggtggcacatgcatttaaccccagcccttgggaggtagaggcaggaggatctctgtgagttcaagaccagcctggtctacagattgatttccatgacagctacacagagaaaccttgtctcgaaaaaacaaacaaaaagtgagctgcatgatctcaacaacagtcgattttgtaaagtattgaaactaaatgacatgagagagtgggtttcatgacaactaggaaatataaaccaccacgcttatgatactatatcaggcttatagcaaccttaacgattggatttcctttagaacatgtggttcctctgagattgtgggaagatgccattagaattacaattacctcccagactgcaacactttccctaggctccatatcctagcctacgacttcagaagacaactttggctttactggaggccaggttggtcctagagaccccaggtaaaacacggcccaccacccattaacatacatttaaagccctaaccctgacccacattcacatcacaaggacatttgctcaactatgttcatagcaacattatttgtaatagacaaatctcaaaaacagcctagatgcccctcaactgatgaatggataaagaaaacgtggtttatttacacaatggagtactactcagtggtaagaaacaatgacatcctaaaattcgaaggcaagtggacagaactagaaaaaaaaatcctaagtgaggtaacccaaaaccagaaagacaaaagagtatttgtactcactcaaaagtggataccagacataaagtaaaagatacccagtctataatccataaccccagagaagcttgaacccttgaaccctcttccagaaacaattgaaagcagatgcagaaattcacaactaaccaatgagtcaagctcctggagcacaatcggagaagtgataaaatgaacaaagaagtcaagaccatgatggggaaacccacagaatcagttggcccaagatagagagagatcaccgactcaggtttgacaaatgggaaacctgcgtaagaccaaactagattctcttaatacaggtgacaatggtgtgactgggccattggcaatgggtccaagatctaacactaatgcacaaactgacttagtggagccctttctatatggagagataccttgcccagcctagacacaagtagatgatgggacagacttagtagacttcctaggggaggccttactctctccatgaaacagatgggagggggagagtggagggagtgggatgaaaggaaggagggggaactgggattggaaggcaaaaaataaattaataaaaaatgaacaaaaataaataagtaaataaatacttaaataaccccagactagatatggagagagtggacagccttgtcttgttcctgattttagtggaattgttttgagtttctctccatttagtttgatgttggctgttaacttcacagtggaaactctgaaagccagaaggccctggacagatgctctttagacactaagagaccatggatgccagcccagactactatacccagcaaaattttcaatcatcatagacagagaaaacaagacattccataacaaaatctatttaaataatggatattatttataatatccacatatatccataaatccagctgtaccgaaagtactagaaagaaaactctaacccaaggaagttagctatacccacaaaaacataggcaatagataatcccacactagcaaaacccaaaaagggaaacacacacacacatacaaacacaacaacaacaacaacagcagcagcaaaatcaaaaataacaggaattaacgatcactggtcattaatatcttttaatattaacaatctcaattcgcctataaaaagacacaggctaagagaatggatataacaacagaatccattcttctgctacatacaagaaacatacctcaacttcaaagacagacattacctcagagtaaagggttaggaaaagattttccaatcacatggacctaagaagcaagctggtgcagctatcctaatatctaacaaaatagacttcaaactaaaattactcaaaagagatgaaaaaggatatttcatattcatcacaggaaaaatccatcaagatgaagtctcagttctgaccatctatgccccaaatacaatggaatccacatttgtaacagaaacattactaaagcttaccaaaccctcctcactaatagtggtagacttcaacaccccactctcaccactggacaggactactagacagaaatttaagagaaaaataaagggacatttctgctcttgtttaaggtattgtacttatgcagctcttataactatgtaatttgaatttctagtccttgaaagtaattattacaaactatttaggataataaagaaatacaggttagtagttaatcacttatcaaacttgtagtcatgttgggtatgtcttctaaatcaaacaaagatatagtttagatagacagatggtcttcaaacacttcacagacatacagaatatggcatttaaaatgttttgttaacatggggtttttcacaacagcgagacacatctgctcctggcagcaacaaatttacttcagagaagatgacaggacattgaaacattgaggaaattccatgtggattttgctttctttcaggcaaaagctagccattttggcaagaaactacccttgccttgactgctgacagtatgttggaacagcagaacacacacacaacacacacatacacacacacacacaaaaaaaaaaaaaaccaaaaaaccaaaaaaacaaacaaacaaacaaaaacctgctgaactcaccaaaatagtggaggacagtctttcaaaagttcctgcttcacagaaaagtctgtcagatattcaaggcctatagactgaagatggataccccaatgttacagaggaaacttgggtgactgaccaggcagtcagctgtttctgtcatttctcttagtcttggaagttgcttgctctgtacttcctgtttactcaagtaatattatatccttctggggtctttgatggagttgataactagataattttagttttcctttgttatgataaaaagtaaattatgtacaaaggtttgaactcatcaaagataatagataaaggagtattttctctaattatgccaaatacaaatgaattagaaattgtcaatgtaattcttaccagatacttgttcttactgtttatagttttattatgttagagttaaaacatttcctttttatttagacaagaggggaaatgttggggaataatctttttaaacactgtgaatacatgtcgctcagattggtttaataaaaagctgaacagccaatagctaggcatgatttccagggcagagaggatgctgtgaggaaaaaggatggggtcaagagaagccagacagatgctggatgagttgaacacacaaaatgggataggtgttaaagcttaaagccacatggtagaacaaagattaataaaataaatgggttaaattaagttataagagctagttagatacaagcctaacttatcatacataattattaagaagtctccgtgtgccgggcgttggttgcacatgcctttaatcccagcactcaggagacagaggtagtcggatctctgtgaattggagactggcttggtctacaagtgctagttccaggacagcctccaaagccacagagaacccctgttttgaaactcccctgccccaaaaagtagtcttcatgtggttatttgggagctggcaggtggaacagaaaaagtcttcctatacctaaatgctagtgtagtgcacaatcagagcccaactatcctacaacagcaggataaaacaatccaatgtagctgacacacaagaagacaaccttaaaaataactttatgaaaaattatagaggtccttaaagaggaaatgtaaaaaaatactttaaagaaattgaagaaaagtcaaacaaaatattggagcaaatcaataaattccttacagaatgccaagaaagccaacaaaaatcaaacaagcaaaggcaacagttcaaagcctgaaaatggaaatagaagcaataaagagaacacaaatgagggaactctggaaatggaaactttgagtatgcagacaggaatatagatgcaagcatcactaacagaatacaagtgttgaaagagaggatctcaggcattgaagacatgacagaggattcattaatctaagaaaatgtcaaatctaaaaaaaatgcctgatataaaacatccaggaaatctgggacactgtgagaagaccaaacttaagaataataggaatagagacctcgtcagccctctctccaggtgaggttactgcaccgttctccaaccctctgccgccatggcctgcagacgtagaagcccaccccggtatgggagccgccacgacgccggtgcgagatggagcctcggacggaagcgcagagcggacggaaaggaccggaagcccgaggactccgaggaaagcgagcgccagattgcagaccgtcgacctgaaagctttacgactcctgaaggccctaagccctgttctagatgttctgactgggcaagtgcagttgaagaagatgaaatgaggaccagagttaacaaagagattgcaagatacaagagaaagcttctcataaatgactttggaagagagagaaaatcatcatcaggaagttctgattcaaaggagtctatgtcctcagtgccagctgatgtggagacagatgaaagtgtcttgatgagaagacagaagcagatcaactatgggaagaacactattgcctatgatcgatatattaaagaggtccccagacacctgcgacaacctggaatccatcccaggactcccaacaaatttaagaagtatagtcgtcggtcatgggatcaacagatcaaactctggaaggtggctctgcatttttggaatcctcctgctgaagaaggttgtgatttacaagaaatacaacctgtagaccttggggaaatggagacagaattcacagaaagcagctctgaatcccagacgagttcacaggacaactttgatatgtatgctggcacacccaccaaagttagacatgtagactgccaagtggaggacgagtttgatttggatgcttgtttaactgaacccttgaaaggcttctctgccatgagttaaatgccaccttgtggcaactctggggaatatttggctctgcctggccatcttggaaggctggctaagcatgagctgctgtgcatttgtatttgttttttcctttaaaagtttattttctcatgataaattgtttttcttgccttattttatgtatggtgagtgttacacatgttttgaattgtaaatgaagctaaatctgaagactgaaccatatcccccccccccaagttggacaacaagatacttgtggtttttccatgagaacttgagatttcagttgccacttttcagatgggttggcagtggattttaaccatgtgtttatgggaccaatctagaatcagctgtctttacaggtcactgatgaaatcttctcagtcaggcagctccagtgactttgtaaaaacttattttctggtctttatcaatgtgaatgtagttttctctcatacagagctctgaacaaaaatgttaggctgttctataatgggctttatgtaagttatgtagtgttaatttggagcttggaatagcactagtgtgaggtagtatcttagtgtgtgctctgagaattgaggcagaagagagagggatttagaaagttttcttttttaatgatcagttaatttaccatgtaatattgctgtaaatgataatgtgtacagatattctgttcatgtattcaattgtaaacttgtcaatatttgcatttctattgcttttgtatggaatgattgcaaaaataaagatgttttaactgaaaaaaaaagaataataggaatagaagaaggataagaatcccagctcaaaacaaaacaaaacaaaacaaaaaatagagaaaatgtttaacacaatcatagaagaaaattttcccaaccaaagaagtacatacctacaaaggtacaagaagcttacagaacaccaaatagattggaacagaaaagaaaatacccataccacataataatcaaaatactaaacctacagaacaaagaaagtatattaaaatcagcaagggaaaaaggtcaactgacatataaaggcagacctattaaaatcatacctgacttctcaatggagaacctaaaacccagaagggcctggactgatgtcatgcagattctaagagaccacagatgtcagccaagactattatatacgacaaagaacttcaagtctttgaagaaagaaatttgagaagatatcagaagatggaaagatctatgctcatggattagtgtgattatcatagtaaaactggccatcctaccaaatgcaatccacagattcaatgtaatcctcactgttatcccaacacaattctttacagatcttgaaaaaacaatactcaatttcatatggaaaaaacaaaaaatccaggatagctaaagcaatcctgtacaataaaagaacttccagaggtatcaccatccctggtttcaagctctaccacagagtgatagaaactgcatggtattggcatgaaaacaaacaggtggatcagtgaaatagaatcaaagacccagacataaatccacatacctatggacacctggttttcaacaaagaagtcaaaattatacaatggaaaaaagaaagcatcttcaacaaatggtgctggcataactggatgtcagcatgtagaaaaatgaaaatcgatccatatctattgccctgcataaaactcaagtttaagtggatcaaagacctcaacataaaatcagatacactgagcctgatagaagagaaagtggaaaatatccttgaaggcattggcacaggagacaacttcttgaacagaacaccaatcagcaggcagtaagatcaacaattaataaatgggacctaatgaaaccgaaaggctcctttaaggcaaaggacaccatcgataggaaaaacaacaccatacagaatgggaaaagatcttcaccaaccccacatctaacagaggactggtttctaaaatatatatatttttaaaaacctcaagaaattaatcataaaaaccccagataatccaatttaaatggggagggtattaatctaagcagaggattctcaacagaagaatctcaaatggccgagaaacacttaaatgtttaacatccatagttttcagggacttgcaattaaaatgactctaagattccatcttacacctgtcagaatgcaaaaaaacaaaacaaaacaaaacaacaaaaaaaaacaaaacacaagtgacaagccaggtggtggtggcccatacctttaatcctagcacttgggaggcagaggcaagtggatctatatgagttcaaggcctgactggtctacaaagtgaattccaggacaggctccaaagctacacagagaaaccctgtctcgaaaacacaaacaaaactcacaagtgacagctcatgctggagaggatacgaagcaaagggaacactcctccattgtgtgtgagtgtaaacttgtatggccacttttgaaatcagtatggcggtttctcagaaaactgggaatcaatctaccataagacccagctagaccactcaaaggatgctcaaacataccactatattcatagcaggtttatttttaatagccagaacctggaaacaacctagatgtccctcaatggaggaatggataagaaaaatgtgctatatttacacaatggaatattactcagctgttaaacacaatgacatcatgaaatttgcaggcaaataaagggaactagaaaaatcgtcctgagtgatgtaacccaaacacagacaacaaatatggtatgtactcactcgtaagaggacattagctttaaaataaaggctaacaatgctacaatccacagacccaaagagactagctaacaaggagggttcaagaggggatgccaagatctccctgggaagggaaaaaagaagagatttcatgagtggactgaatcatttgagaaggaccttcagttgagaagacagattggcccatggggcatttatgagatcgacgactgactgaagcaggggagctcagcccactgtggatgcgccaaccctgggcagatggttcagagcggtagaagaaggcaggaaagcaggacttgcagattgagaaagccaagaagcagcatttctccaaggcctctgcttccgtttctgcctcctgcttcctgccttgagttcttgccccccctcggggatgggaagtgtaaaatgaaacgaacccttttctccccaagcagtgtttggtaatgttgtttattacagcaaagggaataggacacatgcagacatactcacatatgtataattaaacctagattccacaagttagagaaaacacgtaatattttgtctttcttcccattatcctttcttgtcctctccccccccccctcaggacctcttcctgacaatttcccttctactttcacttacatgtcgcatatgtgtgtacatatataatgtacatgtgtatacccctgtctgactaggcctcaagctctctggctccaactccaaccagtcagaggactacaggcgcatgcgcacattccttagcacgaactcagagggtcaagggccggtcaatgtgcacatgcatgttcgttctcctctggcagctgtgttaaggcctcaatccggataaaacaaaagcaataatgtatgtaggtcttcccgaagcagcggttcagaatgatcccacactgtgagcaattctgccaagaaacagaggtaggtccagagtttctaaaccttgacactttgattcttattgtgaagctgccctgtctgtatacttttgagtactcaggctgcgtctttgtgtttggcctctagatggcagtagtacctcacatttgggacagcggggtggggggcgcccacccactcacccacttgctgaatccctctgtaggtctggagaatcacagctttcgtaaataccctcctcgtgaaaatatgaatatgcacaacacaggtaagaatatgaggcaggacacaggtgggggaagggaaatgaaatcagatcattggcttattttaagattcaggaagagaacgtgtaaaagagtggagttgaggaatattagggattacttagtcccttcagcagggacttcatagtggaacgctaataccatattcggtctggttgaggacatgatacacatacagctgtgtccgcagctggggtgctgtggtttggatacagtttgagtatgaaaccccagagattcatgttatcaatagcttggtccctgtagtggtgatgctaagagatagtaggacctttaaaggatgaggaatagtgagaggatgaagctggcccctccctgttctctgatctcttgtcttgctgtgatctagttcctcaagcacacattctaccataagctggcttttctgggatttaacttcctaaaccaaggactaaagaaactttctttgtgttacctatgctcacatgttttatgtagttacagatggactaagccactagataagcagactgtagggtggacattctaatttccaatgcagttctagctctagcggaatcataaggtggccaaaaaggcacaaggggctggagcctgtggcagtgtgtagcaactagaaggaactgtagagtggcctgagttagtgtctatctagttaagggcaccgagtgagttctgttaatcacttatatggcagcaacatgttcttgaaattcattggccattttgatgaaacatcttgggtgtatctgcagatgaacctaaatgcgaggacagtcagatcatcaatgcaaaaaaaaaaaaagcattgtgctccaggacttacttgtttttctctataaacatccaaactgcatcacactgtaccatacttaatgtctgggaaggaaggacagaaatctcttccagggttgggcaggtcaagacagagtggtgctgctaggttgatgggaagacactaagtaagtacacattggggatcatcagacctctggctgacacaatgagagctccagatatttattttgcgtccatggctgttgcttccagatcattgtgtatctatttcacggtgcctggcttaatcagatctatttgctttcagatcattttccatctatttcatggtgcctggcttaatcagatctatatcagcaagtagcataagtaatacttcaaataaatcagcataaaatgagaaactcatgagaacaatttgaccatgaattaaatgtaagacattgcacagagaaagcagaccctgggtctttagtcactgtttttttaatacaattagtattttaccagacttgagtaactattgaaaagttaaagaattatagtgaattatgtaatatgtttctgaaagctgcaatccaaacatgtgatgggtatgtgtaaacatgaaagcaagtgaaatgtgaaagtggctgagatctcagcagagaggggccgtgcttcatacctcccacgagtcagcagtcagccgtcagccttcagccttgtcataacatttggaggctgcagacaaacccaaggaggctaaagccctccgggtctaatgcatttctcctgtttctttaaagacaatttctctgaacaatcaataattttaccctggctaaataaagtatttgtggttttttattgtttgtaaataattcctggttgaattgacttcagatttcttataaagaaaaacttgaattctaaatattgcccataggagaaatatccatcttatgggagttgtttctctggtagttgaataaatgatttttggaaaatatttacaattttctgcaagtccccacttcaatatatgtatgtattagaaatagaacagtagaagatgtgggcttttgttgaaggcaaaattaaagatgaaacttgactaatcttaaccattctatacaaattctttctatcttgccctctagtgtgcatatttgttgcttgctttatttgtacagtctgtgccatgaaagttaggactcagagaggaggctctcaggtcagttcaagttctggggcctctagaccctgtgtcagtaatgcatgatgtcttcagcaatagggatttaccttccacctctggggcacatccaaaggcaatagtaatactctctactcttttggggggtctcttggacaagatgggccaaagatttaaagataacctctcatgcctggtgttggggggcagttagacattctttggctcttagggggaacattgtcagtccagaggggaaaacattttttataatgaatatttttatccaggacaaaaataaacaaacaatcccagaaaaaaaacaaagcaaaacaaaaaaacaaacgaaaaaaaccacaaaactgtctccatcacttgcagtatcggtcagctttcaattcggctttcctgtccagaaatgtctcatgcaaaaacccatctttctgagcctttttaagaattttactatcttctttgcttattttgagtttgtggtcttggaagctctgaaatttctttaaatagttgatttcacactgcttcacatttcctttgtcttcttctgggatgtcatctttcttcttgctttctctttcagcacaggatctaatctttatcatttcttctcctgctgttttattctttgcttctatatcgcctgctccaattgcatctaataaagcaactatttgaagccaataaaggcattttcccatcttgaaacaccggttcccattgttctcttggcccaattgcatctgaaggcccaacaacaagtccatctgaatttataccaaggtattttccatagcctgatttcagggcaattctggaatcagacagtttcacagcagtaaactgctctggggggctggggccctcgtcagcttctctttgtggagctcccagtgtaaaaaggtcattgtccagtgcatggatataggctcctttatccatttcaatggcaatggttcctgaaagctccccaaagttggaaacagtccaccagattcccacaatatcaaattgggtttcttcatcttcttcccgttttctcttatctttgcttttcctcttcctactcttggccttcgaacccttgagcacgagtttggtggactttacataggagtattcagtcatggttccgcactcagaggtgtcagcctccatcggagttcctgtaggcctgggggaggaagtggagaaggccagcaagtggctctaaaggcgggagttgaaagtcactcacgaactctccaccttcttcctctcagcgccagaggggaaaattttatctaaactatatatgtgtatttatccacatgctctgtgtattctaggtttgaggtagatagctaatagtatatttctttattatgatttcttttcagatgtacttactattattttatcctccacttgtatttatctccctcttcctctctaaagaagtcctctttctcacccccatcagataatctataccccgttattctccctattgctcctcctacccctccccttgggtaatggtccctttttactttcctggtttctgtagttactgcaggcaatgtactcacatctgatgaactggagctaggagcctctgacgagagaacatgcaatatttttcttttttctttctgggtttcagttacttcactctataatcttttctaattctgtcaggtccatagacatggctctgcttcatcttgacttaaggttggagagttcaaacccactatttctctctcaagttaaacaatagaatgtttggcctaagctgtggctattgtgtgtcttgccttgacctaaggagtcactaaagggtgtcttagttagacaacaggatatttggtttggggtgtgattacttgacattttcggtattgagaaggtaattacacttgcttgttctttgtatcttggtaaggaagtcttttgcctcctttcccttcccccgctttgattggggtacataagagttttgaataataaacttgaataataagccagatgccctcctccccgactctatctatgtctctagcttgtttctttcctcaatccacacactctcagggacagatcagataggttggctggacagaacagatgtcctcgaaacgtgggtaagtacataattccacggactaacctgtaaatgtttattgtttcattttcctttatatctgactaacattccatagtacccatgtaccacatttcattatccatttattagctgaaggacattgggttgtttccattttctaactattgtgaatagcgaatggtcagccctgaaaacatacatacaagttaacgttatacagcatgagtaggttgtacttttgtatttaggaatgagtgtatatgtgtatatatgcatacataaacatatacataaatgtatataacaacaataaaaaagaggtcatcaatttgaaagggctgaaggtgaaatacttaggaggttttgaagagaggaaaacgaagggaggggatgatgtagttatagtaataatatagtctcaaaaaataaaagaaacatttaattaaacaaagtaataaaatttccaggacattctgtgaaagccagaggaaccatgcctttttctcctccccatcacccacttcaaaaaaaagagaaagaagccattactgcggtgtttggaagccaaacccagtgtaaccaagggagaatttgaaaaggcttgtagtacttgaaataccactttataagaacatacatgaaaggcatgaaagaatgaatttggccaaataaatactatttttcttacaacttgaccaatgagctgagtaactttgttatactcctgatgaattttgccctaggttataaactctagctagcttttgtttgcttagattaaccagtgactaaagaaaggtcaccatgtttttcatggtagctatgtaactgagccagctcctctgtgtgtcctttccaaagagtgaagatatgtgcttttattgctcatatatgtttattcgaattgaggcaatcctccccatgaaagttactttgtatactcagagctaaggtatccaaggagtggctaggtgagttcaacatccacatcgtttccatagggaacagaaagttttactgccctagtgaaatcttacataagccatttcccctgagacccaattatcagtgtaatttttattttgctcttgcctggtctttcccctaagtattacctgtccctgccacccaagatctgttttcttttttacagcttcattgcacagtaaaaattagcaggaaattcagaaatcttcccttcctggatactctctagtcctaaattactggaggagatcacaccctctccagtggtggagtaagaaacaacactggagaagggcaggtggtacattggaaactgtgttccctccaaaggtactgtctagaaaaactttccccacttctgtgtagggacctacttcaaaagaagacagttgctctggtatttcagagaatgttctagaagaaagagtaattataggacttgtaccttgaagtttatggtccacacttctgacttctgattctggtgtgtgtgtgtgtgtgtgtgtgtgtgtgtgtgtgtgtgtgtgtattattgtcattatatcttcccttccttgagaacatttagcctgtgttatggtttgaaactgaaatgcttctgactgggtcatgtatttgaacaccctgttcccagtcagcagtactgttttggaaagttgtgtggcctgattagtatgggcatcactgggcatggactctgatctccctacttctgtttgccactacttgaagtgacatcataccagccccactcatcaggatgaactctaacctctgagccaataaatgcttccttcctcaagttgcttcttacaggtcttttgatatcagggcacaaaggcaactaatgcatttgatatggttgtgactttttcaacttgtcaaattggggaatgtgttatcttttcttaatgggggtcctctggcactaagtctaggaaaacagtctgattataattatagacctatgaccaaaagatggtagatagtattttatggcactgtagcttggccacaatatgccttgaggtttgagaaaggttgacttaattagtacagcatatttaaccatatttttattgtaagagaaaaagattaaggtatttccttaagtgtattcttgtagcagtgccctgctagcccagcgccagagtgatagcaattagtcctaattccccttgggtgacacctggactagccctggagagttagcccctagtctaatctgtcctttgttgactggatatcttttgtccctctatgtgacttcccaagaatatgaaggcctatgcaaaacttggttcaagaaacctaaaaaactgtggtacagtttggcattgtgtttttggaagcttcattcaagttgttctgagcatatggtaatcaatggctaaagtgtaaatgtagagaaaaatgaaattttcatgacttagacataggaaatgtacttcggttcttccaagctagggttccctgcagccacaagactcattctttttttttttttcttattggttgatgaatagagcttttttggccaatggccaggaagacctgcaagatgcctgaagtaggaccagaaaagccctgtacatggcctcttcagtagagggaaaagctgggagtttggcatcctcaacaactcccatatgaccacatggcaagacaactacttcaggtatcttctcaagagccagaaatgtttttcagcaaagctattttcaacaggacgaggcacactatgaagagtctctctccttgtcaataactgaagacattaaacgtgtgaaatgccagccaaatccagtgatcaaccaggcactgactgagcttactttgtgaaatagtagcccacaaggtccaaacaagactgctgtttttaaaaaaaaaaatattaatttatttttttacattccaatcccagttcccctttccttctctcttcctactccccccgaccccgcgcccctcctcccatctgctccatggagaggagagggtaagacctctcctagaaagtcttctaagtctgtcccattatttccttgaggcaggaccaaggcacctctctgtaggggacacagtaaccacacctgctaggggctggctacaggtgacatagggaaggtttaagagtgagggatgcacacgtggaagccccttctttcttttcatcatcggcttgctgtacttactctgtgccctgccagctggctaggtcgctctgtaagtaaggcatccccctaataaatacccttatatttttacctgactctgtactggtaattcccacattacctccccaagcccacacccctgtgtctaggctaagcaaggtatctctccatatggaatgggctccactaagtcagtttgcgcattagtgttagatcttggacccaccgcccgtgacctcatatattgtcccagtcgcaccattgtgtctttgagtcttgttttgacagaccggcaggtacccaccctgtgctgtggcatctgcaacatattcttttatgatgatatgagaaggctgtgttgaatcttctgatggttcagaggccaagcaagaccccttctctgtttcctcagagaaatctggagaggagagagatggtgacacaaaatgaggcccaaataaagcagatgggaaggctctactaaatggttaccctcatttcattcaggtaggattgagactgaggctccccaaacaaaatcttaatgaacaggagaggtcttgaaaaatgcctattgagactcgggaatgtagagagaaaacttaccaagcttaccagtatcacacagttgtagagtcaggaagactagatgattgaaatgtgataaagatgactgtgaaggagaagtaccccagataaatggaagagatgatgaggaactgatgaatgaacttcttttaactaagagttgccacacataaggtttttcacaacaaagagcaatgcttaaagccagaattcaagtgctgctggcttcctttgtcctggcatctggaaggaaaggaagaaggcccaggcaaaaggtgagtatagactaggcaaatatcagtgcactgtaaggatgatggtctttaaaaggacagctatgtttttgtaatttcccatagagtaaggagagacattcagaagactcagaagccaacacaacaaggttcaggaaactgaatgcttagagactagagaggcctgtgtctgttcctgagtggtgctgatggaaaacgatgaaggtaggcccacagaagcaacttttgtgagttgtcacccatgctgagggtgtgcctctgtgtcacttacactccagtaagtagccccagtgacttcaacaactctctaagaagacgtgagtggaatcatgtctttggtctgctgatagtgccttatttggtatgaatagatgtttacatctcccccagaaaagttactacacagattgccttcacactccccaagcaatgggaaattctcaataaaagacctgttctcttaatgttggggatggaaaaaggcttgggtgaggattaagaaggtctcacggctcctacagatttgatccaattgatttaaatttccgcaggggttcttgtgaggacttcaagattggtcctctcattagtttttggaatgtcagccaagtgatatcactttaaaatggagctttctttgcatgccatggttacccaaatccctctcaggcaaactaagtaattgttaaattctttgcccacgacaataatataagcaggcttttccagaacattctttacaatgatagattattccttgtgggaagggtgtaattctaatctcaggggagctgatgtcctctttaggactttacaggcaccaagtgcatgtgtggtatacatacatacatataggatagcactcatataataagataacaataaacacattttaaaaataatttatacatatgtatatttatatacatttatatgttataccctggaaaaccactcttacttgcctgaggggcaggattatggcacaaaggcttgaatgctgcattgtttttcctcatagggaaatattactaaatttcatttactttttcatggttttacttccatatatgtggaaaggtacacattcttttacagtctcctgatggggaatgtccttctgtgtatgtttatcttattgttcaataaagcactgtttggccaatgaggaagcaagataggtgggacaaggagtcaaggaggattctgggaaacgtagtaaaagatccaggcaggaagtgacatagcaggcagactcggtatataagcaagggcaagaaggaagttggccctttccctttcgttctttctcctgctctcttctctgagccacaatgtgatcctgggatgaggatgccagtggaaggcatcctacataagataagtcttataaaatatatagatttatgataattaagactgagctaacagatgagaaattctagtcactggccaagaagcatttgtacctaatataagtctctctgtgttacttgaaaccttaaagtggcagcaggtggaaattgggcgtcttggcagaaactgcccacatgacggcagggcttgagtggatggagtaaagatttgttgttacagtctccagtttctgtgtttttctctggtccaaactatgggcaagagtgactggttagtgcagtatttacctgggacttagcccagaaagattaaaatttcctccaagcaaaatctgtgaatgaaatgagtttggatagcaaaggacagactataccctgagaggagaaagaggagcaagtgaaaccccacagagctgaaatgactcctcataagtacgaggaaggagacgttcctcagtgtaggtggcacagtgatgagggttaaaacattgccttgccagcagtacccatgaggggacctaccaggatgtttgcccattgcagcaaacactttgccaatctctccaccgatctcagctgtgataccgcattgtttaaccatgtccattcctgtaaacatgggcccggatgcagccattcagccatggatagccacttctttggctgatctctccttcattcaaaaagcagccaatgattctggtcccaatttgccctacttcaaccagattttatgcaatgagcaattcatttacatctttatcaggccatacatgtattacaacaacaaattgacatttggctaaggaattgactttgataaaggacatgtcattgttagcgtgtgacccccgataccaaccaatttgtctcacccctacaaggctttcaatacttcctcagaaagattctgattgacacaatacatacaaggaacttggtcagacaaattcttcaattacaccatattgcttccagatgaagttcatcaattaaacatgactagggtcccatccatgcccttggagaccaattttttgacaagtgtgtggagcaatttaaaaagactctgtgatctctcctggatccttatatatgttttgctgcggggggaggcactgctaattcttcttttgtttaaatgtcttctgcagcatatttgttaacaaaaggttgaccctatagggtcaccatggtgaccctataggtactaatggctctaggatactcaggacaaaatcctcctagagagacgatgcatgcatggcttactgagatactaaaggctactgcctgacccaccaccctgacagcttgccaggatggatgctcttctaaggctggtagtccaggatgggtaagaatctgtttgacagactgacctaagacaggcatagtccgttatgccgagccctcctgaggtggagcaacaaggtcaagacaaagcaccctagcacccactgtgtccaacaaataaataaataaataaataaataaataaataaataaggtagaaatgtgggataactcaacctcaatgagcctggcagccagcctatactgatagccagcctgggtctgacataggaccttgacaatagcagacgagagatgacagggacttatggacactgaccacatcacttcagcagataccaactcagtggatctcctcccctggggcagagttgaagagtatataaggcttactcctttctggaataaactgagcttgttattttaacttgttcctgatgcctgtgttggtgtagggcctactttccccccactcccaagagacacctgttgggatcctgcagcagggctctatagattaactctacactaattttagccaagaatacacaaagtcacccatcttaagttcctcctagttacaagttatggaaaaagtctcacatagaagggtggttgctggaaatccagtttataaactatacaaaacatcaatcagacagttcacttcagtatgtgcacaaactttaatcactaatgtcttcttcagatcctgttgaagtcctcaatcctgtgtacctatgtgaaggagataagataataacccttcaaaataatcctgtttgaaacagaaacatggaggcctccgtcttgaacctatgtatcttcctctgagaaatcatgcaaaagattttcccctgggacaagagggaaatggtctgtgaaagaaagaaccttctaccttccaagatgctggcttgtcaatagttttcatgacccaccctctctccctaacttcttccaccactgttattcatcacttcattcatagactgagtagtcaacagtgacgtgaatcttctgggaatacactggtttttccccacgcttgtatttaataaacatgcccgtggcttagcatgggtaaatctgaacagcatcagttgtgtgtttcttgggtgttgtgtgaatgacccaggctatccctaacattagaatccagaactcataaatgctaatccttagggataatggtaacatcatccttgcaatccatgacacatagaagtaaacagtttgctgccatttacacacacacacacacacacacacacacacacacacacacacacacacaccacactcacctggcagaaattatatgcatatactataactaactggaggggggctccagtcagtatccagggtatgcaaaaattccacaaatgggtagagggaattaggaaaaattcttatctacctgaggattagactttttctatctgaaggtgaaaaataagaaaacacgggtgctttctgatggtagctttctttcatcttgaaaaaaaatcctttctgaaaaatctctcttcataccttcataattcgctctacaccctttctccttgctctattcagcagcttctctctaatgaactctccagggcctccacatctctctctctctctctctctctctattctctctctctctctctctctctctctctctctctattctctctctctctctctctctctctctctctctctctctgtctctccacccttcctccactcttttacattaccacacctcctcttaaagccaaactttggacaattataagttacattttcagggccgacccattctaataacacaagataagtcacattctttctcttaggctagggttgtcacattgacaagccagtaagcaacacttggccattcatgtaactttcccagacagaaaatgacattggaattcaagacttaacaataacaaataattagctggaccttgactagtagggagtatgtgcagaaagtccatgtatgtctacaaaagttctgcaagctctgatcttgaattagcaaaacacctgggaaaacgactgctcatatttgtctctaggaccaaccagatattcatctccaggagcaaccaccctgctttgaatttgttctgaagtctaaaattagatgtctgcataaaaagctgtctttgtgactgagaatcctacatcagtctaggaaatgtaaaatatcctagcattatttgtaattatcaaaattatacaggttaagcagaaatcatcttcctgaccaagcacagctatatgtgagcccaataaatgtaaacacaccaccaaagggctgtggaaaggaccccacagtcgttcttaacagggagatatagcagaggcacttgagaaagttacagacagacacaaccagtcatttacactcaggagccctacagattttccaagcggtgcttcccagtagggaattatacatcaggtgggttgacacgttaaatactagtttgcactgctgtatattcccacagccccttgcaaccaacaggtctggacaaaacaccttctttttctctatgcctgctagtgttacaatcattggttttgctgttccatgaccccatgtgttctaatttgctttctattgctgtaataaatgccacaggcaaaaacagcttggggaaaaatgtttatttgagttacacttaaagataacaatccatcactgaagaaactcagaacaagaagtcaaggcaggaaactgagaaggaatcatgaaggaattctgcttgctggtttacttactgcaaaatgcacagctagatatcttatacaggtcaagttgaccagcctagggatgaaacttaccagagtcgactgtgtcctagaacaggtaagaattaaaaacaaaaacaaaaacaaaaaagccacaatatgcccataagccagtctgatgggggcagatctttccagatgacctcgggatgtttcaagctgagaataaaagaaaacaagatactatgcaaacatgcaatttcatcttttaaaatgtcaccaacaagatatagcaaatttgttattgaagttgctttgactgaatatttttagcatacaaatattgagtaaagttatttaggtaattttcggtataagcaacctaagaaaggccttccttctatttctctaaagctaaagagtctgcttggttactaagtgcccaataatgtgagacatctcctgctttcaaactttccctgttgctcatttgttttgctctgagattgtactgtagttaagagtttctggtgttctaaagtgaaaccttcttggagagagtttctttgtccagcacactggcaggaagaggatgggacactttcctacctcaggcacagacatgagaaaaaaacatggagtcacaggactccagaagaggaggagtcagtcctggtcatgaagtgactagaagtgagggggatggatgtttccttttagacccatcaatgacagtgagaggtgagacagaggtggcaggagctaacacatttagaacttggcatttcagcaagctatgcagttctagacaaagctatcaggaaggagagcaggaagcctcagtgacgcctacattaacttcacagagctgagttgcattcaaaattcagggtttatttccccagtgagcctcagagccctctcatagcacagcagggcctcctgcatgttccctttcagtttgtggactaacccaaggaggccgaggctctccacaagttgctcctcatggtcaacacgtctttcagccactttctccaaagctgtgagaagttttgtctgggcaaaggatgattcttctatctttagaccctttaagtagtgggtgatcgccttgtcttctgatttctgatgaaattgttggaaacggccatagcggaaatgaacatcctgctctatgtgacaatcaaggttcctcatgttcagtgccttctggaagtttgcctctgctttttcatattcgtgaatttctgcctgtgcttcagccatgcaaacataagccatctcaagtgtgggcctcagttccactgtcctttgaaattcataaatggcctgttgttgccaattcctgcaaattgcactgctttctgggttgcctgtttctggatctcttcagttggatcatttgttgcctgtagcagagccctacttggtaatgcaggtagccagagtcaggtgatgcctgcaaagccctgtgtaggagctggagagccttgtctatgcagcctttcctacagtaatactgggctgaatagcgaaagacatatgtttggcaggatgcgctgctgagggcgtcttcaatgtgtgtttctgcttcaggtgtttctcccacatcctgaagcttcagggcaagataaactttaagatatggatcttctggatttaagctgacagccttcctgaggggttctagagaagtattattgttgttgaagtcttcacgataggctgcaacagcaaagccagtgttgtattcaggattttcaggctccaattccagagcctttgcaaagcaggccatggcttgtctataattctgtgcaccacatttcagcaaggcccagccttcctcacagtccatctcagcacactccatcctgtagctgaagggacttgcaaattccttgcaaatgttctccaccttgtccaggtaggcctgagcttctgacaagctgcccatgttgtaatgcacccaggcacagttgccccaggtcaccaggcttctcttgtccagcttctccttctgggtcagggcttctgcttctttcacgctctccagggtttcctcatgctggcctttcaggtgcctcacataggccagcaggttgtgcatccctgctgggttcttgatgtctaggaactcaacctcttcctggattctcatttccaaatcaggtaagtcaacatcttcaatcagcagtccccatgtgaagtgacacctcagctgaagcagattctccttcacctgatcaccaccagcatggtctctgtgacaaggaaggaagcaggatggtttgtcatgtgagaaatgaccagaaattgacaccaagcaaaccacattttacaacatacttgtcttttcttgaaactgtgacattttgttcctttagaagttcttgatttagttcacatcaatccctctgctccttttatttgaactggcagagactcattgtgcatgcatgtacacacactaggacttagaaccttaggtgataagttaatcatttcaataaagactggacatggtcacacaggtgtagacacacatacatacatggcagactcctgccctgaggtttggaaccctaaaaaaccttccctcctttcccactgtcttccctcctttcccactgtctttgagctctgcacatgccccctgagcttatctaaatagaaccagtccatgttttaaaaactgaatatggaggaaaagtcattacagggtctgtgctttcatttccgacacaaacaaggatctggtatgatgttggaagtaggctgtctcttccttgtgacactagcgttatttctgggcatatttagtggtggacttctagggactgaacaactttactgtcctttcctgtagtaacatgcaatccttagctttttaaatgtttttacaaacttcatgcattttcttgtcttcttacagagttgtacaagcccttcttaagtgtatatcacttcatgcctcagtatcatagcatacccatctgtgaaatggaattacattagtatttcccatttctggtatttgggggcattagtgaggctataaatataaaatataccataaactccatgggagttttcttcacttctatcagtgttgaaaataagaggtagaatttatttgctaaggttttgtgtaggtaacccacaacaagaccccagacaaaacatgatggcatgactgaatccttctgcctaggctgcaaaagaaaaatcctatgggcccagtgtcttacacaacaaaattttgtttctgtaacttaaaaaaataatcaatgtcagaataccttgtctcaaggtattctgggaaagtgagatagaaaaagaaagggaatgtgacacgttttcagcaaaagtagggagacttagaatctgttgatactacctatccaatagcatgggaaatctttccattttctggtatcttccttaatttctttctttaaagactcaaagttcttgctgtacaggtctttcacttggttagtgttatcccaagatattttatgttgtttgtggctattgtaaagggtgatgtttctctgatttctttcttagccctcttatcatctgtatatagtagggcaattgattttttgagttaatcttgcatcctgccactttgctaagtgtatttaccagttgtaggagttccctggtagagttttttgggacacttatgtaaactatcatatcatctgcacacagtgaaagtttgacttcttcgtttccaatttttatctccttgatctcctttttttgtcttattgctctagctagcacttcaagtatgatattgaagagctaaggagagagtggatggccttgtcttgctcctgattttagaggaatcgcgtcgagtttctctccaattcatttgatgttggctgttggtttactgtatattgcttttattatgttcagtatgttcctgttatccctgatctctccgggacctttataatgaaggtgtgttgaattttgtcaaaggctttttcagcatcttgtgagaagatcatgtggtttttgtttttcagtttgtttatatgatggattacattgatgaattttcatatgttgaaccaaccctgcatcttggggatgaagcctacttgatcatggtggatgatttttctgatatgttattggattcagtttgctagtattttattgagtatttttgcatcaatgttcatgagtgatattggtctgtagttctctttcttagttgagtctttgtgtggcttgagtaccaaggtaattgtagccttataaaaagagtttggcaatgaaccttctgcttctagtgtgtggaactatttgaggagtattggtattaactattctttgaatgtctggtagaattctgcactgaagttatctggccctgggcttttatttttggtggagacttttgataattgcttctatttccttaggggatataggcctgtttaagttgcttatctgttcttcattcaattttggtaagtgatatctatccagaagatagtccatttcccttaaattttccaattttatggagtacaggttttcaaagtatgacctgaagattatctggatttcctcagcattctgaaagcagcttggtactggaacaaaaatacacaagtagaataatggaatagaattgaaaaccctgatactaacccacatacctatgaatgcctgattttttacaaagaagctaaagatatacaatggaatacagaaagcatcttcaacaaatggtgctggcataactggatggtggcatgtagaagactgcagatagatccatgtctattgccatacacaaaacttaagtccaaatgcatcaaagacctcaacataaatccagccacactgaacctcgtataatagaaagtgggaagtacctttgaatgaattggtacaggagataggttcctgaacactacacctgtagcaccaacactgagatcgacaattaataaatgggacctcctgaaactgagaagcttctgttaggcaaaggacatagtcaacgaggcaaaatggcagtccacagattgggaaaagatcttcaccaaccccatatccaacagagggttgatctccaaaatttacaaagaactcaagaagctagtttccaaaacacataataatccaattaaaaagtggggtacagaactaaatagagaattctcaacagaggaatctaaaatgacacttaagaaagtgctcaacatccttagccatcaaggaaatgcaaatcaaaacaactctgagatatcctcttactccagtcagaatggctaaaatcaaaaacaccaatgataatttatgctggagaggatgcagagaaagggaaacaatcttctactgctggtgggaatgcaaacttatacacccactttgaaaatcaatatggcgattcctcaggaaaatgggaatcagtctaccacaagatccagcaactccactcttaggcatataccgaaaagaagcacattcatacaacaaggacatctgttcaactatgatcatagcacaattattttaatagccagaacctgcaagcaacctagatgcccctcacctgaagaatggatacagaaaatgtggtacatttacacaatgaagtgctactcagcagaaacaaacaaacaaacaaacaaaaacaaaacaaaacaatggaatcttgaaattcccaggcaaatggatggaactagcagaatccattctgagcgagttaactcagtcacaaaaagacaatcatggtatgcactctctcatatatggattttacacatagagcaaaggattaccagcctataatccacaccaccagagaagctaggcagcaaggaggtctctaaaagagacatacatgttcccccagagaaggggaaagggacaagatcttctgagaaaattaggagcatgcggggagagggagctaggagaatgagaaagggagaagaggaggggtaaggaggacatgagggagcaggaagactgtgtaggggaagaaaagaggagagcaaaataagagttaccatcaaagagggagccagtataggtttaaagctaaatcaggcactggggaaatgtccagagatctacaaggatgacaccaactaaccatctaagcaacagtggagaggctaccttaaatgccctcctctgataacaacattgacaactaacttatatgccatcctatagccttcatccaacagctgatggaagcagaagcagacacccacagctaaaaactaaactgaactagaatccagttgcagagaaggaggagtgatgagctaaggggtcaagactaagcaggtgaaacccacagaaacagctgacctgaacaagggggagcccttggcccccagattgaacactgggaaaccagcatggaactcatccagaccccatgaatgtgggtgtcagtgaggaggccttggaaatctatggggcctcttgtagtagatcagtacttatccctagcttaggaatggactttgggatcccattttgcatagagggatactccctcagcctagacacatgggggaaggcctaggccctatcccaaaggatatgacagactctaaaatcccctatggaaggtgtcactctccctggggagcagaaatggtattgggtaggtagggtgttagtgggggcaggagaggaggggaggcagagggcagggggattgacatgtaaaacaatcttgtttctaaggtaactaaaaaaatctaaaaaaaaaaaagaaattagaatctggaagtaactactttgaaattgggactttggggttttagagaactacgtcttattaaggagatagatggatagatgtcaattccactttgggaatcttacaatcttttcattagttttgaatgccatttctctacaaaagatgagagatagaattcatctccaactcctttgaacatttcaccaatataagtgaccaaatgtagactgaataaagatgacaacaatgaacaggaaagataccaaaccagagtgggaaaagcccatgaagcctcagctatacataaagaacaacgaacattcaatggggctggagctggagaggtggtgttcctcagtgaagagcacagccattggttggccagtgacagatgtttaaccttcatctctcacataacaagaaacatcacacacacaggacaggttatacttaggaatatatgtgtacgtaacacacatgttacgataaatctttctgccaaacgccaccggagtctcaccgccacctgtgcgctttatgccagccgcccgctggagttagggcccaaatgaatacacagaaacttgtattaggttcaaatgctgcttggccaatgactaggatttctcatctgctatctcagtcttaattatcataaatcaatatattttataagacttattttatggaggatgcctttcgctggcaccctctcttgccagtggctcacatggcgctgctggaggaggaaggggaaaagggacatttcctgtttctcctttcttaaatatgagtctccttgctatgtcacttcctgcctggaacaccacttctctgctacatttcccagaatcctctttggctcctagtcctgtctaacttgctggttctttggccaaacagagctttattcaacaatcaataagattaaacatacacagaagtacttcccccatcacacacatatctatgttcatgtatacatgcactcaaacacaatttatgaaaaaaaagaggccatggatttgaagtggagcaggtagggcaaactgtgagagccttgaaaggggaaaagaaagggaaaaatgtaattagattctaatttcagaaagaaacaaaataatcatgtgggagaatacattaaaaggaatgagggaaaagcaaaggaaatgtttgaaacagtcaagtgaccagccaataactttcttttggggtttccacttcatggtattcacatgcttttttttttttttttgagaaggaaaacaaagttgtttgcagctcttttctcagtaatagcactgagattgcgatccttatgctggccgggaaaaaccattacccgctgagccacctgtccaacaccattcaaagtcttccagtgaaacaattgtgatacttccttcttcatttcacatggcatttcagatcttaaggagattagcttgattgggggccatagaggaagcatcactagtgaccacaaaacaagcctgtttgcaggtgaacactggcagcccttccttccctaggcttctagtaatggacagaggatgcttgaaatgtcattgatgtaccaacctaaagaagagacagagctattttttccttccatctaaacagtaatgagcctcatggcccaggcctccttaggctgatccctctgctctatagtgcattctatttccagggaactattttgtaatgaaatgtctctactactgtttataatcatgtgccactggaccagtaaattgatattgaacacaaatatttggatatttgaaaagtgcccctgcgaatgtttggcagtcgttctggactcaggtctttacttgtatcatttgatgagccaggctagaaaaagataaaaccctaagacatttctgttctctcagtctttgtctgtctgtctgtctgtctgtctgtctctccatctctccctgtctgtctctgtaattttaccttctttctccgtctctgtctgttcagagcaaaaagattctttcccccacatataagcactcagcaagccagagatggtaaactctcaggacagtctcttgtttttagacccagaagctttggaatagaggccattaataacatggtgataatgctatctgtagagccagggcatattaagctcccacagcaggaccagagatgaccaatagtctaggtaacgtttgcctttatctgtatggctagagcctcccccaaccccccaaaatcagggtgggagttagctaataccccaaatgacctctatactgtttgtatgactgacaccacaacagatccttttctagataatacctgaaacctatctctgcaacctgtcttcttggaagaagtgaaatgtacttagagttgagagtcaatgtaattatgccttcttgtgcatgatggagattattatattacacaagggaactatttgtcccaaattatactgtgcttaaatatacactgcttagattagagtctaggagtgtgaacaacactggctaactaagttgtgttcaaccagtttttcctcttacctcatgaagacagttaatctactgccatggaatatgcagagaccccagaaatttgtccttccctgattctctctgtctctctctgaaagtatcaaatgcatgggtaatccttctcttccagagaacttagaaatgatggacagagttctgtaggaagattcatcatggctcagggacatcagattcaatcctgcatttctttacttcccctgcatacagcagcccacagctagaattagagattgtgtccacctcttttgggaaataaagccattggggggggcaactcagagctcctgaacactggacaccagctgcccaggaagttgaacctttactgggctcaccaggcttatcaggctcaccaggatccttctgaggatctgtgatccaaagcacagcccttgtgcatgagctcttgcagcaggaaaactgagcagtacagaggcacagccatctatgtggacaacagggacagagagcagccaggtcttcacagcccacctggtttctcgggatcccccatgcaggtggagagctccagcctttctcacactgcaggcactcatttgcacaccacagtcctagccacctgttagagtgatgggaactggagacccaggcacagcttggtcactgacccaatgaccatgactgtacctgacttaactgccttctgacctctagttaacttggttccagttttttttttttatttttccattgtgatctctgtgttctgtctcatcatataacagaagctctcagcctcctccatacctatttactataaattattttatgttcaaggacacacagttagttgccaaaatgtggagagaatcactggagcactacatgcaagggaaaccatttctaatgattgacactttaaacctgaaagagaatttcaaacagacaagccagagacatttacataaataaccctccccactatgctagtatttctctctgttatatgtatatgtgtgtgtgtttaaatacacacacacacatatatatgtatatatataatatatatatatatatatatatatatatatatagagagagagagagagagagagagagagagagagaccatatatatgggtatatttagtttcttggggaaagccttcaatatctctcatcaaatgtagcagaatttcaactttgttgtctctcattgggggactgaaaaaaatttatcctgtccattggttaacccagacaggaatgggtagaaatcacctgtcacaaacaccttgaatagaatctcaaaaggtcttggagtcagtttagttcttcccagaacaatgagggccttggggtcaggagctaggccagaggacactcttagcagcaacttcttcttttgagctacagaggtgggtagagcggtgctttatccaatcccataggtatcattggtaagtctctctttgtgtgagatgaacatgctaaagtctcccccagacattttgaactacacatgtgagacagatttaaaaactaaagcaagatcgctttctcccatccagccctgtacccacattactgccattaaacaaaatccctgaaccttcaggacaatcagcatcattattcccttttcctcagcagaaagagaaaccagaggacacaacataggaatataagcagactcagtcagacctggccaaacacaaatgtctgtgtcctgtgttcactcaacctgcagagcagggaattccttaccccatggttgttgtgaagctggcaacagctgtctggcttttcacctggatagggctcctctgaaaatgttccttgacgttcttctgtctcatggactttctcaacacctggactctcagataaaggttgggagacagctctgtaagctgtgctaagttcttgatgtcaccaggaggaagctgaaactggaaagtgaaactgaaccttgcaggcttctcctcaggaaaactgaatggtaccagggattggtcctcctgccctctcctctgagctgatggtgagaagcctctgtaacagactgacatgtcagttccattcatctgtccagacagagacatccctggcaccagaagatgctgttagacaggggttgatggaggtgatgtggatataaagaacccagtctggcatcttcacaacacaattgttcctcagtctaaaggactgaagttgtgcactctctccttacaagggagactctactcatgaggctctgttgttttaggatttgctaagatgccaatggggaagtgtggtgatggaggagtccatctgcaggtcagggcccctgcagtcaggaagtggttcataggagcttgcttgatatggttatcctaatgaacttctgcaggtgtcattttctagacccctctgcagagcttgtcagtatacctgaggttttaggagttagcccttcattaactaggccaatttcccagaccctacaaccatgaggcttgctttgtgttaccttctcctgagatgtgtggttgtaaaggcctcttgctaccagtcccagccccataaacaagaacccagcatgtaatctctaaagagtgctgtatgcagtgccttgatgctaacctatcctaaaggccaagacagatataggaaaccacagaaggtgggactcagataggttcaagccaaggccaggatttgtccttctcttgattttcctggttaacctgttttctcagcctattggtatccagatccttagcatggccattgatccctgtctccactaatacagctcatcttcatacctccaaatatgaaagtcattgacaggaacttcaatatccacctctatctccttgatgtaattgtaccctcctgacagtttttctggtcagagagtttcagccctaaacctcaatcagctgacaccaacaggagaagggggctctttggccactttccctaatgaaggttaaatatgtagaacctggatggagatgtgtgtgagcaggtgtcagagtgaaaatgcttgctatcaagcctgcctcctcctggggtcagtccccatattccatagtagaaggatgggacaaaatccagaaggtggtatggtgacattcacacacgttccatgatacattggtatcttcccacacatactcacaaaccctcacaagccagtcacatgtccatgaacagatagtaataatgcattttaaaagggtagaattgaaaagcccaaggtttataaggttcttaactaaaattggtttttttctttgtgttatttttgtctttccttgagccttaatttagtgtaaagtctccatgcttgccccctgacaactgtctgtgcatgcaggtatgagacaaaagaggaaatccagagggcccacacacaactcctttcaaccagctctgtaagtgccctgcatgtagttcctcaagagactgaccttcaagtgcactgaggtaacatggagtcaccctagcctcagccttacaggcatcttgtcagaagtatgaggagctcagtcaatgttctgtgtactctaagatagccagtggctaggcttttcagggtgtccaaggcagaaggatgttccatttcataaatgatctagagtccattatgagggagatgtcacaaacttttgtccactacgtagagccagaatgtgcaccatcttccagttactacccgtccatcagagtgatgaatgatttatacttggaagaggtaaggaggcttccctacaagatcattgtggagaaacctgaatcctgcatgaggagggtccatatacatcccaggccctgcctcagcagtggtctgtgttgttttcttggtctgagttataaccaaaggccacgtggatctggggtctgtgctgtcataggaggccatggagatattcatgggcagaggggcctacaagagcctcatctaggtccattgttctactgcatcctgtgttggtgtctatggtctaagttcatcaaatgctatgggaatatcctttgtctgagctgccacctcaatgtctgtagatcatgctgtggaagggtaccatattgatgtgaccatgttgatatctgtcaacaggacagtctatgagggccttgtctttgtcagtggtccactacaccataaggctgtgctcatgaactgtgatgtctccagaaactgataggagactcatggcccatgcccacactgacttaaagagcaaggggactaactacttttgttgcgatagtgatgaagatgactgcagatacagagttgacagggccaaagatggaaagtttttatgacaatccctatccacctcaaaccaaaactgcatagaaaggaagccatcaaagagaactcgaaaaaatgggacagagggctggagagatggctcagaggttaatagcactgactgcatatacagaggtccagagttaaatacccagcaaccacatggtggctcacaactgtctgaaaagtgatattgtgccctcttctgacctgcagggacacatgcagacagaatactgtatacataataaataaataaatctttaaaaaattgtgacagagacagactgtggtggcacatgcctttaataccagcactagggagatagaagtaggcagatctccatgagtgcaaggccagcctgctctatatcacgagttttaggacatccagagctacacagagaaactcagtctcaaaaaaaagacacacacacacaaacaaaaaaacaaacaaacaaaaaacaaacaaaaaaccaaaagggtgacagaactgtcatctgtaatgccaggtacctccatcaactctccccagcctcctctgattcccaggactccataggcagagcctggtcaatatctcagttggaggtcaacatggtctgcagagtgaatcccaggaaagccagaactacacaacaagaaatccagtctaaaaaaaccaacaaaacaagtaaacaaaaattgtgacagagtagttgtccacacctgacagtgtgtgaagttaggtggaggttgtgaaataaggactcagctgtgttgaaggggcaggccactaacaatttgaccatgcttcagtgaataaagagataacacaaagtagacttccttttttgtttttaattatttatttattgatggataggtgttgtgattttagttggggaggacacaagagggcttggtggtcatggcaggacagtgaagggattgtgatcagggtgcgtattctgaaattcccacaattaaaaacaaaatggcatgtggagaaaaaaattattatagacaattgaaaattgacaaaggaaaaggcccttcagggaaattaagcccaagaacttacctgaaaatcagatgaggaaaggatgtgtcctctgtccttggatatcatccagggaataccagacactgacactgggatgccacagccccaccctgacctgtcatctgacacctgatgtttctgtcaaggtctgaggactctgtgaccagccttagtcccctcccttgatgcagcctgctctactgcaggccctgccccctcatcagctgtcctgccctttatctgccctgcagctcttgccctttgactcatggcctaattcctcagcattgcttttggtctgagcatggcaacaccaccagctgtctctaccaacagctccctcctggccctctaacacatctgtggctctttttcatatgggatctttctcactcttcttttgaaaccttgaactttgcagtagcttttaaactcatattcattgtgtaacatatttatttttatagtatacttatttcctgtgtactgtgtgatatgagacttcacattaataattaagtttggaaatggtctaccaactttggcagatttgtatccaattgttctcactccgttttagttccttttccctggctgtggtaaaataccatgactataagaaagtgtttatttgggcttagtgttccaaatgcacaagagtccctcttggcagaaaggtatagtggcaaactacagtactgcagtcagtagaaggaaggaaagagtacaaacaagaagcccagaggaaagagaaagcaggtgaaggctgcaatgtgacccctttgtgtgtgcaatgatcccttctaagtggtcgactaagaccttcttagagagcagatattcacatgatgattcataacagtagcaaaaaatatatatatgaaatagcaaggaaaagctttttgtggttggtgtcaccatgacatggggaagagtattacagggcttgagtattaggaaggttcagaacctcttccctaggacaaccaaacctcttcagtcatattaaacagcaccacttagcaggggcagctactcaaatataacagcctgggggacagtcccagtcagactagcataccctgaaactgctaaactttgtgactttctatgttttaatgaatcttgcaaagatgtgggcatttttctgttagcaagtccccatagcaaagcatctacaacttctctttgtcttggtgctagcccacagcaaggaggggctgacactctcctaatgaccatagctctcctctggttttggagagtagataaatctttttgcacaatgcatccttgggcaagtctttcaatccggtgactctggccatagtttccaaaggacaatagctccctaaacattcctggctaggaccagtccttatatagtgtcaaaatttcaggctacccatgtccccttctgagttccagcttttgcagtcagaattaacaataggactctgctgaatctaggatgatgagtttatgttcagttctttctgctatctaaccggctatgggccttcttgctgccaatgtaaatgcccccctgttacaaccacttgataaatggacaattaccaacagctgacacaatcacagtaacctaggcagagttcatttaatcatgctacagtctcattctgaatgtggttatctggaatgcagagtgcatgccagacatgctatgaattttttatttattttctatagagttcaacctacagcctgcatgtacgcatggatgccagaagaagggacaagatctcatttctgatatttgggagccatcatgtggttgctgggaattgaactcaggacctctggaagatcacctagtgttcttaatcactgagccatctctcctgccaccatatagtgcatttatttggatctcatctttaggcatggtttatttctcatgtttcttaaaatatggtaaaagcagcaggacattttcaataaagaacatcaaccaatttagttgagatgatgagagaatgagacataatacctggtaatttctgaacatcttttgatccatggattcatggtagagagtcacagggcatgggccaagtataacattcaatggaatgtccagatgggtgctggtggttttgcagcagagtatctgtcactgttaactagcatcataggctttcctagtgcttcagacacagtgactggggaagatatgaaagtgtttgttcttcacccactaacagccaacataagttccttgtacagaagattccaatcatgctcaggacaccctgaaactggcccaacaaacaggtggccttacatgaaagattatcagaattttgtcattatggtcatatgattccattgttgtcatctgtgtgacagttacaagatgcctactaaaggaaacaatcagcattcaaaatctttgcttcagtttgtccttgaaagaaatgatcaaacctgtttaaaaatgaagatgttggctcactcttccttccctctccaccaccccgacctcttctgagcactactcctacccaaggcccccattaacccaggatctctctggtcctgtgcctgcatagagtggacccgctcagacagggagaacctccctgagtctggaaatacctcactcttccttcttcctccactggcctgaccactcctgattgagaagactaccaggagaggcaagaccatccatagctgcagacattgaagttggcctacacacaccacagggtgacaagaggagatagagagacccccacctgcacccactggaagaagagatgggaagaaagcagaataagaatactctcaacaacagaaagaccaatatgacaccaccagaatctagggactgcataccagcaagatctgaaaagcacaacacagaggaagaagagacaaacctaaaaatctactttatgaaaatttttgatactcttaaagagcaaacaagaaaatctcttaaataaatagaagaaaaaccaaacaagaaataagtaattctcttaaagaatctaaaaaaaaaaaaaaaaaaacaagtgaaggaagcactggaaactgttcaaggcatgaaagctaaaatagaaacaataaagaacacagaatgaggggatgctgaaaatagaaaggctggataaacaatcaggatctaaggatgtgagtataaccaatagaatacaagagatggaagagagaatctcagttgtggaagactcgctagaggatatacagtcatctaccaaagaaaatctcaaatccaacaaatctctaacacaaaatatccaggaaatatgggacaccatgaaaagaccaaacctaagaataataggtatagaagtaggtgaagaaatacagctcaaaggtacagaaaacatattcaacagaatcatggaagaaaacttccccaacctacagaaggatatgcctatgaaagtacaagaagctaagctgggcgttggtggtgcaggcctttaatcccagcactcaggaggcagaggcaggcagatctctgtgagtttgaagccagtctgtcccaagagcgagtgccaggataggctccaaagctacacagagaaaccctgtctcaaaaaaacaaaaaaaaggaagaaagaaagaaagaagaaagaaagaaagaaaagaaaagaaaagaaaaaagaaattacatgaagcttacagaacatcaaatagactgaaccacaaaaagaactcccctcaccacataataacaaaaacaccaaacttacaaaataaagagaaaatattaagagcagcaaggaaaaaggtcaagtaacatataaaggcagacatatcagaatcacacctgacttctcaatggaaactttgaaagccagaaggtcctggatagatgtcctacaaacactaagggaacatggatgccaatccagactactgtacccagcaaaactttcaatcaccatagatggagaaaacaagatattccattacaaaaccagatttaaacaatacatatccacaaatccagcactacagaaagttctggagggaaaactccaacccaacaatgataaaactgtactcacaaaaacataggcaatagataatccagctttaccaaacacaaaaagaaacaggagggagaaatccacacacattgaaaccaccaacaataaatccaaagcaaacaagaaccaacaatcaatggacattaagatcccttaatgtcaatggtcttaacctgcctataaaaagatacaggctaacagaatggatatgaagacagaatccatccttctgttgtatacaagaaaaacacctcaacttcagagacaagctttacctcagagtaaagggttgggaaaagattttccaatcaaatggacacaagaaacaagctggtgtagcaatcctaatatctaacaaattagacttcaaactaaaatcaatcaaaagaaatgaagaagggcatttcatactcatcacaggaaaagtccatcaagatgaagtctcaatcctaaacatctatgccccaaatatgaaggcacccacatttgtaaaagaaacatgactaaagctcaagccacagataaaccacacacacttatagtaggaaacttcaacacccccctttcaccactagacaggaccaccagacagaaacttaacaaaagatctatcagaagttatggcccaattgggtttaacagacatctatcgaacagtccatccaaacacaaaagaatataccttcttctcagtgccacatggaaccttctctaaaattgaccacatgcttggcaacatagcaaacttccacatatacaaaaaaattgaaataaaccctgtatcttatcagaccaccatgctttaagactagaattcaacagcaatacaatttgcagaaaatctgtaagctcatggaaattgaataacatccaattgcaccattcctgggtcaaggaaggaataaaaaaaataaattaaagacttcctagaatttcatgggaatgtagacacaacatacccaaacttatgcgacactctgaaagcagtgctaagaggaaagttcatagcactaagtgcccacatgaagaaactggagaatagtcacactagagaattgacagaacaactgaaagctttagaacaaaaagaagcaaactcaccaaggaggagtagatgccaggaaataatcaaactgagggctgaaattaataaagtagaaactagaaaaacattacaaagaatcaataaaacaaaaagttggttctttgagaagatcaacaagatagacaaacgagagagaccatgctaattaacaaaatcagaaatgaaaggggggatataataacagacactgaggaaatccagagatatatcaggtcatactttgaaaacctgtactccacaaaattcgaaagtctaaaggaaatggacaactttctggacagatatcacttaccaaaattaaaccaagaacagataagcagtttaaatccacctataacccctaatgaaatagaagcagtcatcaaaagccttccaagcaaaaaaaaacaaaaaaaaaaaaaaaaaaaaaaaaaaagcccagggccaagagctaataccagtactcctcaaattattccacacaatagaagcaggagggacattgccaaagtctttttatgaggctacaattactttgatacccaagccacacaaagatacaactaaaaaagagaactacagaccaaccccccaccatgaacattgatgcagaaatactcaacaaaatattggtgaatcgaatccaagaacacatcagaaaaatcatccaccatgatcaagtaggctttatcccagcaatgcaaggatagttcaacatacgaaaatccatcaatgtaatccactatataaacaaactgaaaaagaaaaaccacatgaccatctcactagatgctgaaaaagcctttgacaaaatccagcagcccttcatgaaaaagatcttggaaagaacaggaatatatctaaatatgataaaaagcaatatacagcaaaccaacagccaacatcaaactaaatggagagaaactcaaagcgattcgctaaatcattaacaagacaaggctttccatatctcttcaatattgtacttgaagtcctagctagaacaataagacaaaaaaaaaggagatcaaggggatacaaattggaaaggactttcactatttgcagatgatataatagtctccataaatgacccggaaaaactctaccagggaactcctacagctgataaacaccttcagcaaagtagcaggatacaaaattaactaaataaaaatcaattgccctactatatacaaatgataaacagaatgagaaagaaatcagagaaacatcacccttcaaaatagccacaaacaacataaaatatcttggggtaacactaaccaaaaaagtgaaagacctgtacagtaagaacttcgagtctttaaagaaagaaattaaagaagataccagaaaatggaaagatctcccatgctcttggataggtagaatcaacatagtaaaaatggcaatcttgccaaaagcaatctacagattcaacacaatccccatcaaaatcccaacacagttcttcacagaccttgaaagaacaacacccaactttatatggaaattcaaaatacccaggatagccacaacaaccctgtacaataaaggaacctctggaggcatcaacatccctgacttcaagctctattatagagccatagtcctgaaaacagcttggtattggcacaaaaatagatagacctgtgggggactgaatatctctgttatggaatattttaggttccactgggacctaaaatgccgttggtgccaggaagctcctggtcaccattgtattgttaattaacactaggctgttactgtttaccatagcctcagggtaatatgcctcttatttatctgtatgtgcctaagcatctgaataggccctcacctgggcagaggagagagaggtatgagtaacttgggaggacagaaggttgggagtaaaggggcaagtggccagagcagagaggagaacaaagagagaaatggttgcctcatgttattagcaggatggttaagaaacaccagaaaagatggctaataaagaaatgactctagttccacaacatggaacagagagctctctgaacattacaagatgcctgtgtttggtctttatcgacattgggttgctcgaagcttccatgtccacacagccccactcaggtagaacctcatggactaaggctgagacatgctgggtcatgacatagaccaatagaaattgaattgaaaatcctgatattaacccacacacctatgaatacctgatttttgacaaagatgctaaatctatacaatggaaaaaagatagcatcttcaacaaatggtgctggcacaactggattcggacatgtagaggactgcagacagatctatatctgtcaccatgcacaatacttaagtccaaatggatcaaagatctcaacataaatcccacaacactgaatcttctagaagagaaagtgggagatacccttgaacgtattggtacaggagactgcttcctgaacataacaccagtagcacagacaatgaaatctacaattaataaatgggacctcctgaaactgagacgcttctgtaaggcaaaggacatggtcagtaagacaaaacgacagcccacagaatgggaaaagatcttcaccaaccccacatctgacagagggatgatttccaaaatatacaatgaactcaagaagctagccaccaaaacaccaaccaatgaaattaaaaagtgggcctcagaactaaatagagaattctcaacagaggaatctaaaatggctgaaagacatttaagaaagtgttcaaaatccttagccatcagagaaatgcaactcaaaacaactctgagataccatgttacaccggccagaatggctaaaatcaaaaacacccaatgacagtttatgcttgagaggatgtggagaaaaaggaacactcctccattgctggtgcaaacttgtaagatcactctggaaatcagtatggcagttgctcaggaaaatgggaatcagtctacctcaagatccaacaattcctctcttgggtatatacccaaatactgcatttcatacaaggacatatgttcaattatgttcatagcagtgttgtttgtaatagccagaacctggaagcaacctagatgcccctcaattgaagaatggatagagaaaatgtgatacatttataaaaatggagtaatactcagcagaaaaagcaatggaatcttgaaattcgcaggaaaatggatggaactagaagaaaccatcctgagtgaggtaattcagtcacaaaaagacaaacatggtatgtactcactcatatatgaaatttagacagagagcaaaggattaccagcctacaatcctcttcaccaaaggaactaggaaacaagaaggactctaagaaaaaaatgcatggtccacagagaatgggaagggccaggatctcctgagctaattgggagcattagggtaggggagagggagctggctgaatgagagcaggagaagaggagggaagaggaggaaatggagaagcagaaatgttgagttgggggaagaacagaggagagcaggatgagagatatgataacagagggagccattataggtcccaggagagatctggcactagggagctttccagagatctacaaggatgacaccaaccgacaacctaggtaatggtggagaggctatcctaaatgcccttccctataatgagactgatgactactttatatgcatccagtggctgatggaagcagaggcagacacccacagctatacactgaactctggaacccagttgcagagagggaggaatgaagatcaaggggtcggaaccaggccggatgaatcccacacaaacagctggcctgaacaagggggagcacatggactccactgctgtctgggaggccatcatgggactgatccagacccctgaaagtggatgtaaacaaggaggccttggctctctatggggcctctggtagtgaatcagtatttttccctggtgtaagaagggactttgagagcccatcccatgggaagggatgctttctcagcctggaaacatgggggatggcctaggtccagcccaggttgatgttgtagaatttggggagaccctgtggagggccctatcctccatgggaatatggggcgggggctggtggggtgtgaggtggaggggagaaagaaggagaagggattgtgaggcaagcttgctcctaatttaaactaataaaaaaatgaagttgttggtgttcaaaatataatgaccagaggaacggcaagactccaagcagaaactcagctttgacatcaaggtacaacgctatcagttggactcttccagcttaatgaggagagtgtatctggatttccttagttttcatcaacaccataaccagcagctggagagatggctcagtggttaagagcacttgactactcttccaaaagtcatgtatgcaattctcaacagccacattgtggctcacaaccatctgtaatgagatctgctgccctcttctggcttccaagcatacctgcaggctgattactgtatgcataatatgtgaaataatattaagaaagaaaaaacgcaaccaacaagttgccaggctgctctttactgaactctcattctcattatggtgagataggacaaaagaatatcaccccattcagacagacttttctgtgggagttggtctcctggattcactgaaattattgggataatgatttctaagtaatcctcagcatcagctttcataggctactttctgtttattaaacacccactgtatcttacattccatccatccatctactctactcctctccatctccttaggagggtgttatagatttgcccatcatgccctacttagacctccttagacacatccatccatttttgagcatggttacacaatttcaccattttctggtattctgtctactgccatttctttttggagaccaaagtcactgaccattcataagaaaaagacacattttaaaactgccatacaaagggacaatgcctaatcccaagcaaacctcctccctgggcaggtgtgtcagaagtcaaactcaggtggaatggaagcagcagacatgctgcttgtccatcgggacttgcttcatgctcattcaaactcctgtacacagaaaactgcagcttcagttcaataccaggggagggtttggtccctgaggtcatcccaataatgggtgctgtctgttccttctcttaatgcgattgtaagtggtcacacttgttatgtgaaaagtgattctttctttaacaattatgtggtgtatcttttaaaaagtgaaatatagaagaatgggaaggaattcatttctgattccttaactgtatagagtgagtgttgtaacattgtctactaacagtctcctgctagtttatcccttgcttatcacataacctccaaagagttgtcctgcagtgggtagaatgctgctttagggaaacacaccaataactaggacagctcctaaaaggtcatggactcatgttctgggtaaaagagtatgatctgtgtccatgggtgggaaagaacatcatatttgagaacaattgccttcagttctttaatggaaatgtactgaatgcttcattttccaaagcactagagtccagggaagcaggggacaggtaagggttttgccctgttcctgaggtgtgatttcgtgctggttctgtggggtttggctcaggctgatctttcaactcttccccactctctgtaataaataaaaccatttatgatgttatgatactggacagtgtaaaggagagaagaaacaaatagcaaagtgtaagtgagggtatgtgcctataggcatgtgtatttgtgagtgtgtgtgtgtgtgtatgtgtgtgtgtgtgtgtgtgtgtgtgtgtgtgtgtgtgtgtgtgtgtgtgcaggcatggatagagagataagggggtggagaaaaggaaaccttcaggaaatgatgtatcagcataggctgtggtacccatccccattatccgaagcacctgcaggagaataacctttggtgagaggccacttcgcctctgctagtccctggatcaaaaggaacaattgcaatgtgctggcattttaatcctcactaccttttagaatcagttagaaagacaatctaaatcaattctgttcaggctcatgtacagcccaactgcactcaccccagaatctgattaaaatgagttttaagaccatccatcaaacaaacaaatcagaattctcaggggattgtaatgtgcacctggatttgaaccagggactctgtgatcctaggcaagctgtataaaattgaaattgtgtggctgttgataagggactcagcagtggttccagtccacattcagggtatgggaaggggccccacatgcagtgtcatcctttattgtacctattgttcttggtgaatctccagagaagacgatacacagtgtcttcctaatgcacaagagacatgggaaaagaattgtatgacctttgctgtattgacatgagggtgcaaagggatgttttcacatgtatgctgacatgtgtccaatacacagtgttagtgaaggtgcccaatacaaaacacacaggattattcaaagtcaacacttttgttttaaaatctgtcatcagaggcacaggcagagcaggtcttagtgacttggctacctatcacctttacatcaaatccataagctagaggtcacagccccatccccatgcccagcttgatatcagtgttctggaccttctgtcgaattagcgtgcactgcagaatttgctgtgccatttggggtaattatagttgaaaacagcatggcagtggctgtgggtgatcccatgttttctgtcctgccaaggtcatagctatcaaaggcacaaaagaggccattgaacggcattcacttacctgttgctccatctctttttatgttcagtccatgaaaagttacgtttggacacttttgtcctacgtttaatttacacttcctcataacatttggaacagttatggtaactaaggacacacactctgcattcagtacataattggggccttattagttgcctcctgatgcttaaaacataatgcacagttgttctctcaatatcataaatttaatctttttcacattaattaattttggtgtgtgtgtgatagtgtgtgtgtgtgtgtgtgtttgtgtgtgtatgtgtgtacatgaattgtgtcacccatgcttgtcccttgtagtgccatggagggcaaaactcaacttgatgaagattcttcaatgtagttgtgcaaatgaaaagattcaggataataatagagggagtagactatgagtgaggaagaagagcacggaaaacccaaaagagctgacaggacagatgagcagcaggaagaaagagaaagagagaaaggcagaggaagtgtgcctgagctttggcagtgtaggtcagcagaaaagggggactcatctctggcctccttgccttgccgcccctggcccgctctgacttgcgtttggctggcatttatctaataaagcatatcgtaacctcacaggttacaaagctccttcctcattataggccaatgctggacaccttaggcctgttaggttaaatctttctgccacacgcttgagttccgcaagacagagcgtgccaggggcagcaaggcaggaaggtcagagagaggggctcccatgtgccttgttagggatatcttactattgtttatggttgggattggaaggaggtattcaggcttggacacctcttttcagatgaatttaggttttagctgatgtatacatagttagcatatgtcatgcagattattgcatcttcttgtatttcaccattatgagtgttaattttgtatactttacactaagttttaatcttcttttagactaaaaggagaattgtaggggacagtgtaagccacttctgctacaggtgtgccagaccacgcccattagggcgtggtcaaggtgaggtcaggttgacacctgatagggtctaaagggacagacaaggcacatgggagcccctgtctctggcctccttgccttgccgcccctggcccgctctgacttgcgtttggctagcatttatctaataaagcatatcgtaacctcacaggttacaaagctccttcctcattataggccaaatattctgctgtttcaccttgagagaacaagagtggaattgaactctctgacctttagtcaagctggagctggggcatttttgtgagccagacaattttaacaagtgtcaggctaaagaagcctaagaccacccctaactgtatatatcatgcttcccagcaggaggtttacagcaggcaggttggggcttgctaaaaaacatctggtcttagggggaaaaagaaataaactggctcatacatgtgttcctcatatgactctttattattcaaaaaaaacttcttcagaaaggttctctctcaaaagctctctaggatgtttccttaaactttaattattttccctctataagcaattttaaatttctctttcaaaagttctccttaaatactctcctagagttgtttctaaaaattctctgaaagtgccttctaatcattcattgagggaccttcctacagtttcttgtaaaaactctcttgaggtcccacctatcccacaaggcttctagtttttatatccacaggacatttaataactctctgacaacagggcatgaataattctcagagccaggaatgctgattagatcttgagaagagcaagtgtctcaggtctcataggtaagaaatgacttgaatatgtactactaattattaaaggggacttctcagtactctatcaaagggaaaactaaggctttgtagtatgacattgggctgcagatgttactgctgatgacccgtgagaaggaatttcctttctctggggcatttttgagaatataattcttccagtatatattctatatacagccatatttgtaggagcaaatattctggagttgatacctagaatattaattgctacttctgtaataaaagataaaggctcgcagcaaatataatccctaaagagaaattgcaactttcttgtacaaagtagcttcagtcaccatcactatgccatgttgtgtagattgaaatgctttcatcatattttcatctattccagcttttaggtgcacagcttactttcctgcttgctcactagacttcggttaggtgtttctgctatcccaggccttcttgagggacactgaaagattaacttttctttttattagttgattttctacattccaatcccagttcccccaccgtcctctcttcctgcttccttcattccctcacacatcccatctgcttctgagagtgggtaaggtctcccctaggaagtctactaaatctgttctatcatctccttgaggtaggaccaagggtcttctccacccccacaggcctgtgtctagactggcaaggtttctctccatagagaatgggctccactaagtcagtttgtacattagtgttagatcttggacccactgccagtggcctcatatattatcccagtcacaccattgtcacctatattaggggagtttagtttggtcttaagcagattcaagggtattcttttgaactgtattgacaacttacacagaaagggtttgtgattcccaagaatttattgaatttattttagttgaggaaaaaacatcacatataacacattatcagtgacatagaaaaattgaaaaaagctccttatatcttcttcactctgtaaggtgccagaaagtttcctttgcttttcttgcccacacatgagattcttattactgtgaataatttaccagtgaggtgaaatatctcctgctttcaaactctctcctttactatttgttctaatctgagattgtactgtagtaagagtttctgataacctaaaacagaaaacttttggagaagatttctttgtccatgacactggaaggcagagggtggaagactttcttacccaagattcagacataaggaaaagtgttctgtctcctttagctcacagcaggagtcagtcctggtcattaagtgaacaggagtagtggggacagaagttgcttctagacatgacagagaggataagaaagaggtggcaggagctaacacatttagaacttggcatttcagcaagctatgtagttctggacaaagctatcagggaggagagcagaagcctcagtgatgcctacattaacttcacagagttgagctgcattcaaaacacagggttcatttccccagtgagcctcagagccctctcatagcacagcagggcctcctgcatgttccctttcagtttgtggactaacccaaggaggcccatgctctccacaggccgaatattgtggtcaacacgtctttcaaccactttctccaatgctttgagaagtttccttcgggcaaaggatgattcttctatttttagaccttttaagtagtgggtgatcgccttgtcttctgatttctgatgaaattgttggaaacggccatagcggaaatgaatatcctgctctatgtgacacttaacgctcttcatgtccagtgccttctggaagtttgcctctgcttcttcgtattggtgaagttctgcctgtgcttcagccatgcaaacataagccatctcaactgtaggcctcagtttcaaagtctgttgaaattcacaaatggcctgttctgccaattcctgcaaattgccctggcttctgggctgctggtttctggatgtcttcagttggatcatttgtttactgtagcagagacctatttggtaatgcaggtagccagagtcaggtgatgcctgtaaggccctgtgtaggagatggagagccttgtctatgcagcctttcctacggtaatacttggctgcatagcgaaacacataattttggcaggatgtgctgctgagggcttcttcaatgtgtgtttctgcttcaggtgtttctcccacatcctgaagcttcagggcaagataaactttaagatatggatcttctggatttaagctgacagccttcctgaggggttctagagaaaaattatggtcatcaaagtcttcacgataggctgcaacggcatagccagtattgtattcagggttttcaggctccatttccagagcctttacaaagcaggccatggctcgtctataattctgtcctccacatttcagcaaggcccagccttcctcacagtctatctcagcacactccatcctatagcggaagggacttgcgaattccttgcaagtgttctccaccttgtccaggtaggcctgggcttctgacaagctgtccatgttgtaatgcacccaggcacagttgccccaggtcaccaggcttctcttgtccagcttctccttctgggtcagggcttctgcttctttcacgctctccagggcttcctcatgctggcctttcaggtgcctcacataggccagcaggttgtgcatccctgctgggttcttgatgtctaggaactgaacctcctcctggattctcatttccaaatcaggtatgtcaacgtcttcaatcagcagtccccatgtgaagtgacacctcagctgaagcagattctccttcacctgatcaccaccagcatggtctctgtgataagaaaggaagcaggatggtttgtcatgtgagaaatgaccagaaattgactccaagcaaaccacattttacaacattcttgtcttttcttgaaactgtgacattttgttcctttagaagttcttgattttgttcacatcaatccctctgctccttttatttgaactggcagagactcattgtgcatgcatgtacacacactaggacttagaaccttagatgctaagttaatcatttcaatcaagactggacatggtcacacaggcgtagacacacatacatacatggcagactcctgagctgaggttaggaaccctaaaaaaccttccctcctttcccactgtctttgagctctgtgtgtaaaagcacatgctgagctgatctaaatagaaccagaccatgctttaaaaactgaatatgtaggaaaagtcatcgcagtgtctgcgctttcatttcagacacaaacaaggatctggtatgatgttggaaaaggctgactctgccttgtgacactagtgatacgattgttctctggaccctttacctctgcgtgtatttggtggtggacttctagggcctgaacaactttactgtcctctcctgtagtaacatgcaaaccctggctttttaaatgtttttacaaacttcatgcattttcttgtcttcttatagagcactacaagcacttcctaagtgtatatcacttaatgcctcagtatcatggcatacccatctgtgaaatgggaatgacattagtatttcccatttctggtatttgcaggcattagtgaggttataaatataaaatacaccacaaactccatggaagttttcttcatttctatcagtgttgaaaataagaggtagaatttatttgctcaggttttgtgtaggtaacccacagcaagaggctttcagtcatggctacaagacacaaagtcccttagttctgttggtagttgtctctgctacagacaacagatgccatggtgcttaaatacgctgctgactttggctttgatttgctcagatgccaagaacaatggcaggaggtgtgatactctattgggtatttaccctaaaagagcagtctagctgggagcacctaaaggtagataaacagaagatgacagtcacctagaaacctcataagacaggcagttgggctgtctagctcacctatcccccatgcctctacccagataatgccataactaaagtgctggggaccatagatagccccccacttctgggttcacttctactacaagaactttgtcttctttctttcagctaagttcccacttataaccccaaaatcagtgttctttctgaaaacccacagctatggtccatgaaatccagttttggattctacaagactggaatgcaacaccatggactcaaaggaaactttgtgtgactgaccgaaagctaaaaacatctccaagatggtccgataatcaaaatgtttatatcatagatttggactcactataacctaaaataatcaacacatatgatgccaggatgagtaaccctgtcagacagaaagggaaatatgccacagatgatggtgctacaaaaagaccccagacaaaacatgatggcatggttgagtccttctgcctaggaaaatcctatgggctcagtggcttacacgactgaactttgttttctgtaatttagcaagttataaatgtcagatcaaacctagtctcaaggcattctgggaaaggagataaataaggaaatgcaaggtgagactttttcagcaaaagtagggagtcttagaagttacttctggattcttctggaagtaagtactttgagactggggcttttgggttttacagaactacacatcttattaaggaaacagatggatagatgttacttccattttgggaatcttacaatcttttcattagttttgaatgccatttctttaagaccagagatagaattcatctccaactcgtttcaacatttgaccaataaaagtgaccaaacgtgagctgaataagaatgatgacaacgaacaggaaacacaccaaacaagacagggaaaagcccatgaagcctcagctatacataaagaacaaggaacattcaatggggctggagttggagaggtggtgttcctcagggaagagcacagccattggtttacagtgccagatgttcaaccttcatctctcacataacaggaaaccttataaggacaggacaggtaacacttaggaatatatgtgtatgtacacacacatatgtatgtctgttcatgtatacatgcactcaaacacaattaatgaaaaaagcaggtcaaatttgcagtggagcaggcagcttactatgtgaggggcttgaaaggagaaaggaaagggaaaaaggtaattagtttttaatctcaaaaagaaacaaaaaatcctgtgggagaataattaaagggaatgaaggaaaagcaaatacaaaagattaaagcagtcatagtgaccagcaaacacctttcttttaagtcctttttctaagtcttgttctttctatactcctcttttttcacctggcattcaaatgtgtgtgtgtgtgtgtgtgtgtgtgtgtgtgtgtgtgtgtgtgtgtgtgtgtgtgtgtgtgattagtactaatgccaaggcatgcacataaaggtcagagaacagcattagacacaagtcttcacctgcttggttttttgttttgtttttgtttttgtttttgtttttgagaaggaaagccaagtggtttgcagctcttctctcagtaatagcaccaaaattgcaatcctcatgctggccaggcaacaaaccctttacccactgagccacctgcccagcaccattctaagtctacaagtaaaataattgtgatacttccttcttcctttcacatggcatttcagatcttaaggagattagcttgattgggggccataaaggaagcatcactagtgaccatgaaccaagcctgtttgcagatgaacactggcagtccccactgcccacctggtttctccggatcccccatgcagttggagagctccagcctttctcacactgcaagcactcatttgcacaccacagtcctagtcacctgctggagtgatgggaactggagacccaggcacagcttggtcactgacccaatgaccatgactgtcacctgacagaccttactgccttctgctctctggttaacttggttccacaggttttttttttttttttccgttgtgaactctgtgttctgtctcatcatataacagaagctctcagcctcttccatactcatttactatgaatgattttattttcaaggacccacaattagttgccaaagtgtggagacaatcactggagcactacatgcaagggaaaccacctctactgattgatactttaaacatgaaaggaatttcaaacatacaagtcagagacatttacataaatgacactccacaccaagtcactatttctctctgttatgtgtatatgtgtgtttaaatatacatgcatatatatgtatatacacacatacatgcatatatatacatacctgagtaatttagtttcttgcggaaagccttcaaaatctctcatcaaatgtagcagaatttcaaattttgtctctcattggggaaacagaaaaaaatatgtcctgtgcattggttaacccagacacggatgggtagaaatcacctgtcacagacaccttgaatagcatcacaagatgtcttggagtcagttgagtttatcccaggacaatgaaggccttgggatcaggagctgggcaggaggaaaatattagcaacaactatttcttttaagctgcagaggtgggtagattggtgccttgtccaatcccataggactcattgataattctctcttttgtgagatgaacatgctaaagtctctcccagatgttttgaactaacatataagacagacttaaaaactaaagcaagctccctttctcccatcctgccccatgcccacaaaactgccattaaaaaaaaaatccctggaccttcaggacaattcgcatccatgttccctcttcttcagcataaagagaaaccagaggacataggaatataagcagactcagtcagacctggtcacacacaaatgtctgtgtcctgtgttgactcaaactgcaaagcaggaaaatccttaccccatggttgttgtggagctggcaacagctgtctgggtttacacaggataaggctactcagaatcctgccgtgactctgttgctttgtggattttctcaccacctggactgtcatataaaggcttggaaacagccttgtgagctgtgatgtgttcttgatgtcaccagcaagaaaatgaaactggaaagtgaaactgaaccttgctggattctcctcaggaaaactgaaaggaaccagggattggtcctcctgccctctcctctgagctgatggtgagaagcctctgtaacagactgacatgtcagtgccattcctctctccagagacatccctggcaccagaagatgctgttaaaagggggtaaatggaggtgatgtggaaattaaggatccagcctggcatcttcacaagacaattgttcctcagtctaaaggactgaagttgtgcactctgtcctagaaaaggagactataccatggggctctgttgttttaggatttgctaagatgctaatggggaagtgtggtgatggaggagtccatctgcaggtcagggcccctgcaggcaggaagtggttcatcccagcctcccagttttgttatcctaatgaacttctgcaggagtcatcttctaggccagtgccctctgcagagcttgtcagtctacctgaggctttaggagttaacccttgattaactgggccaattccccagaccctacaaccatgaggcttgctttgtgttaccttctcctgaggtgtgtgtttgtaaagggctgttgtcgccagtcccagcctcataaacaagaacccagcatgtaatctctaaagagtgctgtatgcagtgccttgatgctaacctatcctaaaggccaagacagatataggaaaccacagaaggtgggactcagataggttcaagccaaggccaggatttgtcctttctcttggttaacctgttttctcagcctattggtgtccagttccttagcatggccatcgatccctgtctccactaacacagctcatcttcatacctccaaatatgaaagtcattgacaggaacttcaatatccacctctatctccttgatgtaattgtaccctcctgacagtttttctggtcagagagtttcagccctaaacctcaatcagctgacaccaacaggagaaagagacactttggccactttgcctaatgaaggttaaatatgtagaacctggctggaggtgtgtgtgagcaaggtgactaggtatgtgtcagagtgaaaatgcttgctatcaagcctgcctcctcctggggtcagtccccatattccatggcagaaggacaggacgaaatccagagggtggtatggtgacattcacacacgttccatgatacattggtatcttcccatacatactcacaaaccctcacaaccagtcacgtgtccatgaacagatattcatgggcagaggggcctataagagcctcatcttaaaagggtagaattgaaaggaccatgggttaaaaggctcataactaaattatttttctgtgtgttatttctgtctttccttgagccttatttgagtgtaaagcctctatgctcgtcctgtgacaactgtctgtgcttgcaggtatgagacaaaagaggaaatccagaagacccacatacaactcctttgaagcagctctgtaactgccctgcatgtaattcctggagatattgaccttcaagttcactgaggtaacatggagtcaccctagcctcagcctttcaggcatcctgtcagaagtatgaggagctcattcaatgctctgtgtggtctaagctacttcaggctgcccattgatgagggatattccatctcataagcaatctagagtccattatgagggagatgtcataaacttttggcaactacgtagatccagaatgtgcacaatcttccagttactacttttccatctcagagtgatgaatgatttatacttggaagaggtaaggaggcttccctacaagagcattgtggagaagcctgaaaactgcatgaggagggtccatatacattccaggccctacctcagttgtggtctgtgttgttttcttggtctgagttataaccaaaggccacgtggatctggggtctgtgctgccataggaaaccatggagatattcatgggcagaggggcctacaagagcctcatctgggttctactgcatcctgtgttggtgtctattgtctgagctcatcaaatgctatgggaatatccttggtctgagctgccatctcaatgtctgtagatcatgctgtggaagggtaccatattgatgtgaccatgttgatatctgtcaacaggacagtctatgagggccttgtctttgtcagtggtccactgcaccatagggctgtgctcatgacttatgatgtccccagaaattgattggagactcatggcccattcccacactgacttaaagagcaaggggactacttgtgtggcgatagtgatatcgatgactgcagatgcagagttgacagggccagacatggaaggtttttatgacaactcataccccctaaaaaccaaaacaacatagaaaggaagccactaaagagaactcttaaaaatggtacagggggttggagagatggctcagaggttaatagcactgacatgcagaggtacagggttcaataccaagcaaccacatggtggctcacaaccatctgaaaagagatatcgtgccctcttctggcctgcagggatacatgcagacagaatactgtattcataataaataaataaatatttttaaaaagtgtgacagagtcagacggtggtggcacatgcctttaatgccagcattagggagacacaggttggtagatctccatgagtgcaaggccagcctgctctcgatcacgagctcaggacatccagagctacacagaaacatcctatctcaaaaacaaagcaacaaaaaacaatcaaacaaaatacccacacaaacaaacaaaaacccaaaagggttacagaactgtctgtcatctgtaacatcagttaccttccatcaactctcggcagcctatttcgattcctgaaccccagcttttattcccaggaatccataggcagaggcaggtcgatatctcagtttgaggtcagcctggtctgcagagtgaatcccaggaaagccagaacacacaagaattccagtctaaaataccaacgaaacaagtaaaaaaaaaaaaaaattgtgacagagactcttaagagtagttgtccacacctgatagtgtctgaggttaggtgtaggttgtgaaataacctatgttgaaataagctgtgttgaaggggcagggcactaacaatttgaataagttccagtgaatatatagataacacaaagtagacttcttttttaaaattatttatttattgatggataggttttgtggctttagttggggaagacgcaagagggcttggtggtcatggcaggacagtgaagggattgtgatcagggtacttgatgtgaaattcccacaattaaaaacaaaatggcatgtggagaaaaagattattatacacaatttaaaattgacaaatgaaaaggcctttcagggaaattaagcccaagaacttacctgaaaatcagatgaggaaaggatgtgtcctctgtccttggatatcatccagggaataccagacactgacactgggctgcagcagccccaccctgacctgtcatctgacacctgatgtttctgtcaaggtctgaggactctgtgaccagccttagtcccctcccttgatgcagcctgctctactgcaggccctgccccctcatcagctgtcctgccctttatctgccctgcagctcttgccctttgactcatggcctaattcctcagcattgctcttggtctgagcatggcagcaccaccagctgtctctaccaacagctccctcctggccctctaacacatctgtggctctttttcatatggaatctttctcactcttcttttgaaaccttgagctttgcagtagccttttaaactcatattcatggtgtatcgtatgtatgtgtataatatattttttgctatatattgtgtcatatgagacttcacattaataattaagtttggaaatgggctccaactttggcagatttgtatccaattgttctcactccgtttaagtgccttttctccagctgtggtaaaataccatgactataagaaagtgtttatttgggcttagtgttgcaaatgcacaagagtccctcttggcagaaaggcatagtggcaaactacagttctgcagtcagtagaaggaaggaaagagctggcctctccagtacaaacaagaagcccagaggaaagaggaagcaggtgaaggctgcaaattctcaaagcctcccccagtgacacatatcctctagctcattgcttgtcaacctgtgggctgtgacccctttgtgtttgcaatgatgccttccaactagtcgattaagaacttcctagagagcagatattcacatgatgattcataacaatagcaaaaattacatttatgaaatagcaaggaaaacctttcctggtgggtgtcaccatgacatgatgaacagtattacagggcttgagtattaggaaggttcagaaccacttctctaggacaaccaaagttcttcagtcacactaaacagcacatcgaaccatggctagctaatcaaatataacaacctggggacagtcctaggcagaccagcataccctgaaactgccaaattttgtgactttctatgttttctaatgaatcctgcgaacaatgtacaaagatatggcattccggtctacgtatttgccagcttttccccacagaaaaccaactgcaacttctctctgttttggtgctagcccacagcaaggaggggctgacactctcctaatgaccataggttttggagagtagataaatctttttgcataatgcatccttgggcaagtctttcaatctggtgactccggccatagattccaaaggacaatagctccccaaacattcctggctaggaccagtccttattatagtgtcaaaatttcaggctacccatgtcccctacttagttcaagcttttgcagtaagaattaacaataggactctgctgagtctgggatgatgagtttatgttcagttctttctcttatctaaccagctatggggcttcttgctgccaatgtaaatggcccagtgttccaaccgcttgataaatggaaaattaccagcagctgacacaaagcacagtaacctaggcagagttcacttaatcatgctaaagcctcaatctgaacatgcttatgtggaatgcagagtgcatgctagacatgctatgcatttttaaatttattttctatagtgttctgcctacagcctgcatgtatgcttggatgccacaagagggcaccagatctcctttccaatatttgggagccatcatgtagttgctgggcaatgaactcaggacctctggaagatcagctagtgttcttaaccactgagccaactctcctgccactgtgtagtgggtttatttggatctcatacttaggcagtgtttatttctcttgtatcttaaaatatggtaaaagcagcaggatcttttccatgaagaacatcaacctatttagttgagaatatgagagaactagacgtaagacctggtaattctgaacatcttttcatccatggattgagggtatagagtcacaaggcatgggccaagtataacattcagtgggatgtcaggtgggtgctgctggacctgcaccagagtatctgtcactgttaagtagcatcataggctttcccagtgcttcagacaaagtaactgggcaagaattgaaagtgtttgttcttcacacactaacagccaacatgagctccttgtacagaagattccaatcatgctctggacaccgtgaaatgtggcccaacaaactggtggccttacatgaaagattatcagaattttgtcattatggtcatatgattccatggttgtcatctgtgtgacagttacaagatgcctactaatggaaacaatcagcattcaaaatctttgcttcactttgtccttgagagaaatgatcaagcttgtttataaatgaagtttttggtgttcaaaatataatgaccagaggactggcaagactccaagcagacatttagacttgacatcaaggtagaactcttcagttagacttttgcagcttaatgaggagagtgtatctggatttccttagttttcatcaacaccataaccagcccgctcagtggttaagagtacttgactgcttttccaaaggtcctgtgttcaattcccaacagccacattgtagctcacaacaatctgcattgtaatctgctgccctcttctggcttccaagcatacctgcaggctgattaccgtagcataatatttgaaaaaatgttagaaaaaacaaaaaacaaaaaacaaaaaacatcaccagcatgttcccaggatgctctttactgaactctcactctcattatggtgagacaggacaaaagaatatcatcccattgagacagacttttctgtgggagttggtctcctggattcactgaagttattgggataatgatttctaagtaatcctcagcatcagctttcataggctactttttgtttattaaacacccactgtatcttacattccatccatcaatctattctactcctctccatctccttaggacggtgttatagatttgcccatcatgccctacttagacctccttagacacatccatccatttttgagcatggttacacattttcacattttctggtattctgtctactgccagttctttttggagatcaaagtcactgaccattcataagaaaaagacacattttaaaactgccatacaaagggacaatgcctaatcccaagcaaacctcctccctgggcaggtgtgtcagaagtcaaagtcaggtggaatggaagcagcagacatgctgcttgtccatcgggacttgcttcatgctcattcaaactcctgtacactgataactgcagcttcagttcaataccaggggagggtctggtccctgaggtcatccaaataatgggtgctgtctgttccttctcttattgctactgtaagtgttcacacttcttatgtgaaaggtgattctttctttaacgattatgtgctgtaactttaaaaaatgaaacttagaggaatgggatggtttccatctctgaatccttaactgtatagagtgagtgttgtaacattgtctgctaacagtctcctgttagtttatcccttgcttatcacacaacctccaaagagttgtcctgcagtgggtagaatgctgctttagggaaacacaccaataactaggacagctcctaaaaggtcatggactcatgttctgggtaaaagagaatgatctgtgtccatgggtgggaaagaaaatcatatttgagaacaattgccctcagttctttaatggaaatgtactgaatgcttcattttccaaagctctagagtccagggaagcaggggacaggtaagggttttgccctgaggtgtgactctcgtgctggttctatggggtttggctcaggctgatctttcacctcttccccactctctgtaataaataaaaccatttatgatgttatgatactggacagtgtaaaggagagaagaaacaaatagcaaagtgtaagtgagggtatgtgcctataggcatgtgtatttgtgagtgtgtgtgtgtgtgtatgtgtgtgtgtgtgtgtgtgtgtgtgtgtgtgtgtgtgtgtgtgtgtgtgagtctgtgtgtgtctgtgtgtgtgtgtacaggaaagatagagaagagataagtagggggtggagaaaaggaaaccttcaggaaatgatgtatcagcataggctgtggtacccatccccattatctgaagcacctgcaggagaataacctttggtgagaggccacttcgcctctgccagtccctggatcataagggaacaattgcagtgtgctggcattttaatcctcactacattttagaatcagttagaaaaaaatctaaatcaattctgttcaggctcatgtacagcccaactgcaatcactccagaatctgatttaaaataagttttaagaccatccatcaaacaaacaaatcagaattctcaggggattgtaatgtgcacctggatttgaaccagggactctgtgatcctaggcaaactgtataaaattgaaattgtgtggctgttaatcagcgactcagctgtggttccagtccacattcagggtatgggaaggggccccacatgcagtgtcatccttacattgtacctattgttcttggtgaatctccagagaagacaatacacagtgtcttcctaatgcacaagagacatgggaaaagaattgtatgacttttgctgtattgaaatgagggtgcaaagggatgttttcacatgtatgctgacatgtgtccaatacacagtgttagtgaaggtgcccaatacaaaacacccaggattattcaaagtcatcacttgtgttttaaaatctgtcatccgaggcacaggcagagcaggtcttaggctacctatcacctttacatcaaatccaccagctagaggtcacagccccatccccatacccagcttgatatcagtgttctggcccttctgtcccattagcatgcagttcaaaatttgctgtgccatttggggtaattgtaattgaaagcagcatggcagtggctgtgggtgatccatgttttcttcctgccaaggtcatagctatcaaaggcacaaaagaggccattgaacggcattcactttcctgttgctccatctcgtttatgaagtttttatgctcagtccatgaatagttgactttggacacttttgtcctacatttgatctgtacttcctcatgggacatttggaacagctttggtaactaaggacacacactctgcattcagtacataattggggccttatcagttgcctcctgatgctcaaaatataatgcacattgatttctctcaacattataaatttaatcttttccacatttatttattttggtgtgtgtgtgtgagtgcacatgaattgtgtcacccatgcttgtcccttttatacacatggagggcagaactcattgatgaagattcttcaatgcagttgtgtaaatgaaatgattcaggataataatagagggagtagactacgagtgaggaagaagagcacggaaaacccaaaagagcagacaggacagatgagcagcaggaagcgggtgggatggcagggggaagtgctcctgagctttggcagtgtaggtcagcagacacagagcacataaggggatgctgggcaatgtgtaacagccacgcctcaagccaaacattctgcagtttctccttgagagaacaagattggattgaactctctgacctttagttaagctgaagctgagccaattttatgagaccaacaattttaacaactgtcagggtaatgaagcccaagaccatccctaactgtatatatcctgggtctgggcaggaggcttacagcaggtaagttggagcttacttaaaacaaacaaacaaacaaacaaacaaacaaaaacaaaaaaactgatctgagtggcaaggaattaaactgtttcatacatgtgttcctcttatggctgtgagatggaatttcctttctctggggccttattgagaatctgaagcacccagtatatattctatatacagccatatttgtaggagcaaatattctggagttgatacctagaatattaattgctacttctgtaataaaagataaaggctcacagcaaatataatccctacagagaaatggcaactttcttgtagaaggtagcatcagtcaccattactgtcccatgttgtgtagaatgaaataatttcatcatatgtttagctgcttctagctaggtgcacagctttaatttctacctgctcaccaggcttctgatagctggttctgctagcccatgccttcttggggacactaaaagattatcttttgggggttttatatttactgatttttttagaaccaatcccagttccccctccctcctctcctccctcttccctcattccctcccacctcccatctgctcctcagagagggaaaggcctcccctaggaagtctactaagtctgccccatcatctccttgaggcaggaccaaggcgctattccacccgccccagccccgtgtctagactggcaaggtttctctccatatgaaatgggctccattaagtcagtttgtgcattagtgttgcatcttggacccactgacagtagcctcatgtactgtcccaagggcaccattgtcacctacataaagggagtttagttctgtcttatgtgggttccagaatattcttttgaattgtattgataacttacacagaaagggcttgtaatttgcaagaatttattgaatttattttagttgaggaaaaagcatcacatatagcacattatcagtgacaaggtaaattggaaaaagctcctcatgtcttcttcactctgtaaggttccagaaagtttcctttgcttttctttgcccaaccatgacagtcttattactgtgaataatttaccagtgaggtgaaatatctcctgctttcaaactctctcctttgctattggttttgctcagacattgtactgtagtaaaagtttctgatgacctaaaacagaaaacttttggagaagacttctttgtgcaggacactgtcaggcagagggtggaagattttcttacccaagatacagacataaggaaaactgctccatgatccctcagatgacagcaggtgtcagtcctggtcattaagtgaacaagagtagtggggacagaagttgcttctagacatgacagagaggatgagaaagaggtggcaggagctaacacatttacaacttggcatttcagcaagctatgcagttctggacaaagctatcaggaaggagagcagaagcctcagtgatgcctacattaacttcacagagttgagctgcattcaaaacacagggttcatttccccagtgagcctcagagccctctcatagcacagcagggcctcctgcatgttccctttcagtttgtggactaacccaaggaggcccatgctctccacaggccgaatattgtggtcaacacgtctttgaaccactttctccaaagctgtgagaagtttcttccagacatatgtcttttctcctgtctttagaccctttaagtagtgggtgatcgccttgtcttctgatttctgttgaaattgttggaaacggccatagcggaaatgaacatcctgctttgtgtgaccccagaggctcttagtgttcagtgccttctggaagtttgcctctgcttcttcgtattggtgaagttctgcctgtgcttcagccatgcaaacataagccatctcaattgtaggcctcagtttcaaagtctgttgaaatttacaaatggcctgttgtgctaattcctgcaaattgccgtggcttctgtactgcctgtttctggatgtcttcagttggaacatttgtttactgtagcagagccctatttggtaatgcaggtagccagagtcaggtgactcctgtaaggccctgtgtaggaggtggagtgccttgtctatgcagcctttcctacggtaatacttggctgcatagcgacacacataattttggcaggatgtgctgctgagggcatcttcaatgtgtgtttctgcttcagctatttctctcaaaaactgaagcttcagagcaagataaactttaagatatggatcctctggacttaagctgacagccttcctgaggggttctagagaagtattagtgcccttgtagtcttcacgataggttgcaatggcatagccagtgttgtattcaggattttcaggctccacttccagagcctttgcaaagcaggctatggctcgtctattattctctcttccacatttcagcaaggcccagccttcctcacagtccatatcagcacactccatcctatagcggaagggactttcgaattccttgcaagtgttctccaccttgtccaggtaggcctgagcttctgacaagctgcccatatggtgatacacccaggcacagttgccccaggtcaccaggcttctcttgtccatcttctccctctgggtcagggcttctgcttctttcacactctgcagggctttctcacggtggcctttcaggtgcctcacataggccagcaggttgtgcatccctgctgggttcttgatgtctaggaactgaacctcctcctggatccttatttccaaatcaggtatgtcaacgtcttcaatcagcagtccccatgtgaagtgacacctcagctgaagcagattctccttcacctgatcaccaccagcatggtctctgtgacaaggaaggaagcaggatggtttgtcatgtgagaaatgaccagaaattgactccaagcaaaccacattttacaacattcttgtcttttcttgaaactgtgacattttgttcctttagaatttcttgatttagttcacatcaatccctctgctccttttatttgaactggcagagactcattgtgcatgcatgtacacacactaggacttagaatcttagatgataagttaatcatttcaatcaagactggacattgtaggggaagctgtagccacgcctacttaggggctggctacaggtgtgcctgaccacgccctcacaaactttcgagggagtggtcagaggacatagggtgacttcgttttcaccttcggtttcttttttgggcttgggtacagactgcttccacgccggctggctaggtcgctctgtaagtaaggcttttccctattaaatacccttatatttctacatgactccgtattggtaatttcccactataggacacggtcacacagctgtacacacacatacatgtcagactcctgccctgaggtttggatccctaaaaaaacattcccgtatcctactgtctttgaggactatgtgtaaaagatcaagccccctgaattgatttaataaaacctgtccatgctttgaaaactgaatatggaggaaaagtcatcgcagggtctgcgctttcaattcagacacaaacaaggatctggtatgatgttggaattaggctgtctctgccttgtgacactagcgacatgattgttctatggacccatttttcctgggcgtatttggtggtggacttctaggaactgaccaaccttactgtcctctcctgtagcaatatgcaatccctcgctttttacatgtttatacaaacttcattttcttgtcttcttggagagcagtacaagcacttcctaagtgtatatcactgcatgcctcagtatcatgccatacccatctgtgaaatgggaatgtcattagtattttctatttctgatatttggggggcattagtgaggctaaaaatataaaatattccataaactccataggagttttcttcacttctatcagtgttgaaaataagaggtagaatgtatttgctcaggttttgtgtaggtaacccatagcaagcagctttcactcatggctacaaggcacaaagtcccttagttctgttggtagttgtctctgctacagaccacagataccatggtgcttaaataagctgactgtggctttgatttgctcagatgccaagaacaatgtcaggaggtgtgatactctattgggtctttaccctaaaagagcagtggatttggatcacttaagggaagataaatagaaaaggacagtcatctagacacctcatgaggaaggcagttggactgtctagctcacccatcccccatgcctctacccagataatgccataaccaaagtgctggggaccatagatagccccccacttctgggttcacttctactgtagggattttgtcttctttctttcagttaagttcccacttataacccctcaatcagtcttctttctgaaaacccacaggtatggtccatgaaatccagttttggatattacaagaccagaaagcaggaccatggactcaaaggaagctttgtgtgattgaccaatatgctaaaacatctccaagatattccaataataaaatcgattttgatatcatagaactggactctctctaacctaaaataatcaacacatatgatgccagcatgaatacccctgtcagagagaaagggaaatatgccacagatgatggggctacaaaaagaccccagacaaaacatgatggcatggctgagtccttctgcctaggctgcgaaaggaaaatcctatgggcccagtggcttacacaactgaactttgttttctgtaacttagaaaattataaatgtcaaatcaaacctagtttcaaggcattctgggaaaggggattaaaaaagaaatgcaaactgacacttcttccagcaaaaatcgggagtcttaaaagttagaatctggaagtaagtactttgagactggggcttttgggttttatagaactacacatcttattaaggggacagatggatagatgttactttcattttaggaatcttacaatcttttcattagttttgaatgccatttctctaagaccagagatagaattcatctccaactcatttgaacatttgaccaataagagtgaccaaatgtgagctgaataaggatgaccacaatgaacaggaaacacaccaaaccaaacagggaaaagcccatgaagcctcagctatacataaagaacaaggaacattcaatggggctggagttggagaggtggtatttttcagggaagagcaaagccattggtttccagtgccaaatgttcaaccttgatctctcacataacaacattataaggacaggacatgtgacacttaggaatatatgtgtatgtacacacacatatgtatgttcatgtatacatgcactcaaacacaattcatctaaaaagcagaccatggatttgccgtggagcaggcagcttaatatgtgaggggcttgaaaggggaaaggaaagggagaaagttaatttgcttctaatctccgaaagaaacaaagaatcatgtgggagaatacattaaagggaatgaaggaaaagcaaaaacaaatgtataaagcagtcataatgaccagcaaatacctttcctttaggagtaccacttcactggtcttcacattttttttttcctttttgagaaggaaagcaaagtggtttgcatctcttctctcagtaatagcaccaagattgcaatccccacgctactaggcaacaaaccctttacccactgagccacctgtccagcaccattcaaaatctgcaagtaaaacaattgtgatacttccttcttcctatcacatgcatttcagatcttaaggtgttgagcctgagattggctgccataaaggaagcaacactagttaccacaaaccaagcctgtttgcagatgaacaccagcagcccttccttccctaggcttcaagtaatggacagagcatgcttgaaatgtcattgatgtaccaacctagagaagagacagtactattttttcatgccatctaaactgttatgagccttgttaggatatgtacctggctgaccctcccccctaacaatgggcgccgggaacattgacaggctgtctcccttttttccccccaagcagcccgctggcgggcacgtgggaaggcaaggggactttgacacacagttcaacaacccacactacatctcaccggtttgctgggactctacgtctaacactagaccctattagtaaggctacctcctttcagtcggtgtaaatgtctccctgaaccagaaggattgacaattgagggcccagaacccttctggtttcttggaggcaggggaacacctgaccgcgatcttcaaggtcacgatcaactccctttgctgacaatcgctcctggcttattccccatgggtgtccccatcagtagctgtttgcccccttggtggctagccgatgtgggactgttgcattcttcgggatagctgagtccctatttagacccagggtctatcgggctgagccctctcgacacccccacgagctgacgagcattggttgaggggcttctggaggttttttagtttttcaccatgggaaataaaccaaccaaggagataagaccatccactccactgggatgtcttctagaaaacttaaaacctttacacctcatgccattagttaaggcatccagactcacttgtctcagtatgaaaaaatggcctacgtattccttagagaaccagtctcactggcccccaaacaggactctagaccccaaagttttgcaggatttacctaaattctgtcagcaaactggaaaatgttaggagttaccctatgtgcaggcctttttctatctttctgctaaacactctctcactcctcatctccagtccttctagctgtggaatttaagcccgaagtaaatcttattgacttaaatccagccgatgaacctccaccagttcatctccagcctctaacaaagccctctgaagcctctgctaagaccccgacccatctatcttttcttctgcttcaaccgttcctgctccagcttcctccgattcagcctcttccaaacgcccaccccccccactcgatctcgaaagggatcccgacctgccaaagccaacccagccatggtcctccccttgtgggaggtagctggggtggatggggttgttagcatccatgtcccctttccactgtcagaactctctcagattcaccccagattaggattctactcccttaaccccactgccttttataaaggaatttcaatacattgcacagttttatagtcttactttccatgatattttcatgattttaagtaacaacctactacatgaggagtgcaagcaagtttgggatcacgtgaaggcgtatgcagatgagatacatcaaactcacccagctcaccctactaggactgtcccagagcaggaacactactgggattacaacaccccgggtgggattttggctagagatcagtttataacttgtctcataactgatctgtaaggctgccctaaagcccataaattatgataagcttctagataaagtccaggacaaatcagaaaatccctctcacttcttacagcgcctaaaacaggcctttttgcagtatactaacttagaccctgaagcaccacagggaagacaactccttatgacatacttttttttttgtagctgccctgacattagagcaaaacttaaaaatttggagagaggaccccctaactccacaggaggaagccctaagagcggcgtttaaggtgtcaccatgggagagataacaaggcccttaatcacaaacaccagatgctagctgaagccatcaggccagcctcggcgtctgcccagggtctcttgtccctcggggctcaaggaccacagcgtccatgcttcaagtgtggtcaggaagggcactgggcctggggttgtccaaatccctatgcgccatgcaagccatgtccaagatgccaggaagagggtcattggtcagtggattgtccccatgtcccacatgacaagaggacatcaaacacagactgccctccagctgacttcctagccctggctatggacgaggatgatgaatgatagggccctgactctcctaacccaactaccgttatctccgaaagggagccccgggtagacattaaagtatcagggtggtccatgtccttccttttggagaccagtgccacatactcagtgctaaaggagactccacctcttacctcagcagactccaccactgagctgtatttttagggggattcccttcactcattcattttggttataccaacttgtccggtgcctttactagggagggatcttttagctaaggtaggagcttctatttcttttgcaacccacatttgcctgacttcagactcgccaggggttccctcctcctcctcctagctactcaccctgcaggcaggttccagtatgtcatttcctttaccagcctctcaggcagaccccaaggtctgggacacccagaacccttctgtggctagacaccatccccccattgtcattcagttacaggacccctcgaggtacaatgctcaagtccagtacccactcccactccagagccttaagggacttaaacctattatctctgaccttctaaggaaaaagttgtttcttcctacctcctccccctttagcaccctatactggcagttcaaaaaaacctaatgggacttatcatctggttcaggacctccggctcattaactctgcagtggtgccactccatcctgtggttcctaacccttacacactccccactactattcctccagggacatatcacttctcagttttagatcttaaggatgccttgttctttatacccctccacacccagtctcaaagcatctttgctttcacctggactgaccctgatactcaggccttcactaagctcacctggactgtccaacctcagggcttccaggacagtccacacctttttggtcaggccctggcttctatctttccccaaacctacgttcatgcagtatgtagatgatattttacttcagagcctctccttggaagttagctggactgacacttccactctcctaaatttcctgtctagcaggggttacagagtctcaccttctaaggttcaattgtctactcctcaggtcacctacttgggactaaccattaccccaacccacaaggctattactgtagacagaaacaacctaattgagtctcttgcagttccttctactaaagaggagattttatcatttctaggaatagctggcttcttaagctcctggatctgctcttcctctctccttgcccacctcctgtatgagcagctctcggatctccacatgaacctcttctacttctacttctattagtaaccctgttactaatccctttcagagacttaaacaggcccttcttaaggttccagccctttatctaccagacttaactcatcctttctccctctatgtaacagaaaaagaaggatttgcccttggagttctaggtcaccagctaggatcttcctttgcacctgtagcatatctattgaagaagcacctgtagcatttgtcgaagaagctagacctgactactcaaggatgggcatcctgcatacatgctttagcagctgctgagctccttatccgtgagtcaaagaaactaacctttgggtcagccatcactgtcttctcccaccacaacctgtcccatctcctaacctacagaggcttacaaactctacctccttcctgagttctttccctccaggtggcattaatagaagatgccacacttactttccaatcttgcccaccccttaatatctcaaatcttctacctcaacttaatgctaaatgttgtccagttcattcctgccttgaaaccttgaaggaactattggcccatcctttacacatacaggaagtcacactccctcaggccatctatacctggtacacagatgtccactcctttttatatgaggggactcgtaaagcaggctatggcatagtgtcagacaccagggtggtggaagcacgggcactttctgcccacactactaaccaacaggctgaattaatagccctcacctgtgccttccaattggcacagggacattctctaaatgttgacacagattctaaatatgcttttcatatcctcctgtcccacgcaggtatttggaaggaacgtgggctacttactacaagaggaggatccatagataactcaggttatattatggccatgcgaaaggcctctcacctccccaaaagctacaggaattattcactgccggtcacatcagactgacagctccattatctctaggggcaacaactgggctgatgaagcagctagggctgcagccctccaaggctcagacctacctcacccaacacagggaattcgcaccctacaacccacatcctcacagcaaactcctgacattcaacaaattctgtcctacttacaccagttcttcctaccctaacagtaaggctctttctgtttttcaaggctcacctccaacctacttctgaggacttaaatttcttaaaacctatcactgcttcttgcaaaacctgtgagatgtcagaccctaactccaggtatcatagctccccttttcccagccaccaggttaggggctctctctcagggactgattggcaacttgacttcacccacatgcccacaatcaggtgagttaaatacctcctgatactagtggatactttctcagggtgggtagaggcatttcctactactaacaagatagctcagacagtctctgacatccttctcagggaaattatttgggattccagcctctctttagtcagacaatggtcctgagtttacctctcagatctctcaaaccctgtctaaagctctcaatatcccttggcattttcatattccataccacccccagtccccagggaaggtagagtgttcttgttaaaatgtcacaggaacttcatcttgactgggtgaaacttttgcctctggcccttttcaggcttaggattctcactaaacaaccacttttcatttcaccctttgaactcatgcatgagcagccagctctaacacctggcctctcacctaaactctcacctttccctgaccccctgcttacacctttacttcatcatctcagctccctcctatgggaatttgctgaccactctctatctcgaccatgtgctaccccctgtacctccccaattaatattggggatcaagtacttctttctcctccagaccagagcccctccccctgtctcctaaatggcagggccccttaagatgattcttgtcactccaacagcagctaaacatgagggccttccccactggattcacttatcccacctcaagccctttccttctccacctgagactcacccttcatacagtttctgcaacaggaccctgttcccttaagcttcggaggacaccaaaaacatctactctgcctcccatttcagaagaataaggctccacttctacaaggctgatttaaactcttgcttctcattacaccctgctcatcaatttcctaggtatcccacaataactcacttaaaactcttaatccaactgcttaactgttgttatcgaaatgccagcctaaaagcatgaatctaaagacgctaggaccaccaaatatttgtgccttctgggcaaaggtaaccagaaagattccataccacctagatatggtctaatatgtctaatctttatgttttcacaaacgttaaggattcttgtaagttccagggagctgaatcagatctaaagaggtcagattcactccaggtaatattcaatctttcccagtcccagattcccttccttcatcttgggacacctcgggaacccctccctcatcttacaatcttccctcaaataccaggacctaagaaaaaatatttctaaacttaaccttgtcctctgctctgccaacatcttgccaggtcaaggaggcaccagggagttccatgcagcctggactgcaataaaaccaccagctaccccaggacgtggcagcgccccaaccttctcaggttccccaaagatggtcaacgattcccaggtcagcaggaagcagctttgagaattcttcgtccctacttccctaacctgccgtgcccaattctctaccttttataataaacaacagccgggattgttaggatatgcacctggctgaccctgccccttaacaatgggcagggcatgcacaggaaaaatgtgtatgtcatcaccacctcactggccacgcattaaggcctgcatgaggactctgcgaatgtgtgaagcctcagtgcacatacacagtcttccctttaaaagatccagccttccccactcccgtttctaggtctcctcttggcttggctgacaatccaaccccatcctcccccctcttcctgtcaataaattccacgtgggtttttcttccttagtttcctttctttacatagatagctgcagcgagaaagaatagcaaaagcctcatggcccagtcctcctcgggctggtccctctgctctatagtgcatcctatttacagagaactattttgtaaagaaatgtctccacttctgtgtgtaatcatgtgccactggcccaggtctttgatgttggacacaaatatttggatatttgaaaagtgcacctgggaatgtttggcagttgttcctggactcaggtctttccctataacatttcataacagactacaaagagataaaaccataagacatttctgtattctcagtcttggactctttgtgtagcgtccagcactacaacttcttactggttcgagtaagggatctgcggatttaataaagacaaccagtcattcttgaaagaagaatgccaattttatttagaggggagttgacttatatatcatcagcagcaccctaggaagcaactcaaatcaaagttcaggttcttaagcccctgacaataagcagataatctgcatatttgtaaacaggccataatggcaggagggaaaatgaggaaatagcacctgaacatgaggcagccagtagctccccaaggatactgcagatcaaccttagataagagaagaaaagcagacttccaggggtcccccacaggtcacccgttaaacatataaaaataaaaatgagcatctgtcttaagatttacaggaagtcaacatctaccgtgcccgtcatagaaaagcctgcccagaccttgcagaccctctcttttaggtaaacagatgtcccctgaaaataacccatcattgataactcatttgtcctgcaggttcagctagacctgcactgagggatagtctgctgtcaagggaagcatgatttgctttctctgaaaatggctctggacttgcttttttgtgctgcaaggtagactagggccaaaaggaagctgcccggatttcaatcctgtgggctagcaatccctctctatacctgaagtgacctttagcaacagttccaaaagacaggagtctccctaaagaggaggcaccctgatttcacaagtctaaatattttgagtagccaatttcgaaatttagagaagttagccaattaaaatttaaagtgcccattcagactagagaataaatataacttttgggatcttaaggtagaggaaccctcccctgagaaccacccagtaagtttcctgtggtaaatgcctgaggggcagcgaaaccagaaattgcagccactttggaagtcaagaggtcaaaatctctcctgtgtggagtaaggaaaagctggtcctctcctgggagtcccactggcataacttggtaccacgaacattgaggttgcaatcccatcatcttgacagcttctctaagtggcatttctggaggaaaccgttaaacatttctccctcctaagggagggttacttagcataccaaagggtgtaggagcacatattgtaagttaaattaaccctttgggcagccaaagagactgcatgttaagcaggccaaagagactgcatgttaagcaggcctaaggccagtagaggaacatatgggaaaaggttggtttggcttctagttttactaagtagacacggccaacgatgaggatatttgttcctttaaatccttattgctgaccacctttcccaggttaaggttggagctgaccataaccagtcacacgtgtctctgagaattcatgggcaccaaggctggcaggtttcccattagcatccaatggttaattagagggctgaatcagcaggaaccgggcatagataaagctatggatcccagattggagattctccatcctgtgggaaaatgcaaatggacccccaagcccacaccaaaaccagatctgggcctgggcctctccaaaggcatgagggaacatctttccatttaaccagaggcgttttctgcagaggaccgctaatgaggatctgctgcagagttattggaattacccactattaaaattttttaaatataaagaattagtgatagagtgaggggagcctcaaggcctcccttctttactttaaccaaataagctagtagtgtgatgggcttgttccacaatagccagcccttgggggttgtaaggaatgccagttttggggggtaattacaaaatcctgacaaaactgatagaaacttgacacatggtagggctattagccatgcctataaggctctcttaaatttaaagatggaacattgaaagcaaaatgctgacaatcagcagggtgcagaggaatagtgaaaaaaacaatcctttaaatctatcacaagtaaatactgatttttggggatggccataggggctggcatccctggctgagtggcacccatgggcatcatggtcttattgacctgtctcaagtcttgtaacagcctccaattacctgattttttttcttaacaacaaatattagggtattccaggaagaagtagaagggacaatgtgaccgaatatgaattgcacctgaactagggcatgagcagcctccaattttattttagacaggggccattgttctagtcaaatgggttcatcattttttcaagtgataggaatcataggtatacgaagctgtggaacagtggctcccattaaaaatgtcccaatcctcaccggtctccaggggccttgtgtattgggagtttgtctgatacaggcaaggggtcgccctgtaatttcttcccaatcccttttcctgtgcaatagccttgctctttaagcatctgctgtacagtaggcatggccagtatggcccccattgcttctaggacatctgggttcatacctgaattacaaataaatattgtgggtactgttattcttttgtttaagctgcagctgctgatataaagaaaggaacaacggatgaacaacccacatggagtttatttaccagaaagggggggagagagggatgggtagtcagccaacccaaagaggagccaaaaggaagagggagagagattggcggcaggaccttttaaagggaaggttgcttatgtgcactggggttttgcacctgcacaagagtcctcacaggttgcaatgcatggtgggtgagtgccctgttgtttgggggtggggtcagagtcatccaggtgtattgttcttacaggtatacctcattgtttggcaattttgaggagcagtttctctagctaaaccaaattatatatttagactttacttattgaatcatgaggctgtagagctctttctaccaatccaccaatttcattaatcaatctattaactcgttccctttagccagtaggcaggggaaaggccagaacaactcccaatatgacccataaaacatggcaattttttaaatgaacagcattttgaatttgcccaaaaaacatttttaacctgatcataatagtctctatgtatagaattgtctccataatttaaagagacttaaaaatataatgattcttagcacatagattaaatgaatcatattgttagatgctgagagaccattgcccattatttgattctctgagttatggttggggccatctgtcctgtatagttttattctgatagaagctcctcttctatcagaagaaccattagtaaaaattgacgtagtattttcatggtactgctccttactattttgggaatctgaaagggtgcattagtgtaaattgcaacagcccatgagttggaaactgattatcaattttctttgaaaatttagcaaaaacaattgtttaatgaatcattattttgagacaactaataacctgttgcttggtgtaagggacatgttatcagccaaaatacaatctacatgttatatggcatttgtacatcatgcaggctattgccttaaaataagggtttaatactttggctggtgagacaggtaggtgtgaccatagtaaaggtctctcctgacacagaacagaagtctgcctacactttgtggggagcacataagcttcccatggctttgtattgctcacttaatctgctgatgctggattaaacaaactctaacagtagaaaatttgcctccccaatagttagctgtctgggtgaattgggatcatcaactcttttagaataccattttaacggttttaaatcatcactagatgccccccaaaagagggaaataaccacagaatatttttttaacaatttcttttaaaagaaatcattcaaagattgtaatccatactttctaatttttaagcctaatttctttagaatattacacatgttccaaatgtaagaccctcggaaagcccaggcttctagaatcttagccaggaccaaggccatccaaatcacagaatggaggcaaaagcttgatgcaaattgcatgaggctttattgtagtttaactagctaaccccatgttagctccggtctttgacccacccaccatgacggatggctagcaaagacagtttgaagcccctgcacacagatctttatagggcagtgtaagaggagtgtctaggggtacgcacaggctcaggattggtgtgcctccaggcttggggagggtttgacctgtgttgattggtcaactggttgttatggcccatagaccctcccagggtggttgctatgctctctacgtcattgctgtgtgcttgtccgtaaagcacacccagggttgtaaagcacagcgccaccagctaacttctgatgggttccttgtcacgagacaggcatctgacctctaagtcaccaacgaaggtttatggcgagcatgcattcggctgttatggctgccgaaagggaaggtggtcccttcagctcaacctactgaatgcatcagacctgcgactgcttctctctcctctgggtccttcaacatttctacactctggtccaggcaatgagcttagcttcatgacagaggctcagctttgcatgaataggagctgccccaggttctgttctcgacaccagcctgtccttgttcatctcgtttcctcacccttactgcctagcttgggggactttattgtagctgacatagggaatgaaaatgaagcaagagcctcacaaagactgcttaggtagactctataaacacatatgacaaaaaatccctttcagctctgtttctccttccaaagtgtgactcataatgagaagactgaagaaagttgggaattggaaagttagcaatctagtttcatttctgcggattccggctgtcactctgtggaaattatttccgtaactcttgaggtgtagcgtttccccaaaggtttctcttacttcccctttcagctccagggcttgccttgaggtatatcaggtctatcagttgctacacagagagttctgagaagtgtgtagagattacattatgactttatatgtgaggtagtgcggcctcagagtacgagcttttgattgcatccttttattttatagagagtgttgttctgaaggggattaagctacacataattttttaagcctgtaggtgctggtcagcttgaattgaccccatagttataaggtaggaaaaagcactttcagtacatttttaaaaattattttaggtgatgagtgctttatctcagcagatgtctgtgcatcgtgtacatgcctgccgccctcagggtcagaaaagggtgtcagatcccttgagactggagctacagacagttgtgccctgccatgtaggggttagggattgaacctgtatcttcctggagagcaggcagtgctcttaataatgaagccatctctctagcccccctcaggtacatttatggaggtgcttattctagaagcagtataagtttgggttcagcacactcagcaaacctgtatccttaaatgtattagggttttggggttttcttttttcttttattgtaactttattgtgtagcactgaaacatgagctttgtagatgacaatgtcatgtcaaaggttggacatacccgtagaccctcactcaggtcactgagtcctggttctagagccagactacgagaaacaaagatcctctactcacaatggtacagtcttatgcaagcctcctatccctttgtagtctatttttggtcatctaaagaaaaggtgccgaccacatacatcagagaataaacataataaatgaaagacaaaaaactagttcttgactcacagggagtaatttttaaaaggttgtcaaggagttcaaatgaggtaaaggaactacagctcagaaaaaccacatcagacagccctggatagtatcccacaaggcctgttcatggaagggatatatctatattgcccatatacgtgaatttgttttgaggataatctgaactgcaaacctattctcaagggctacaataaataaataaataaataaataaataaataacaaaaagtgagaaaaacacctgaatgaagaaaagatttatgtgactcatggttgcagacattctaatccattgttgcctggcaccattgcatttaagcttgtagcaagacagaaatgtcacaaggtaagggcatagatgaccaggaaactgcttacctggtggcctttgggaaacagagtaaatgaccagaatgggccaagaacaaggattcatctccaaagacccatttcctctaagaatgccgctagtttccagccatttgaaataagtgtatcaagttataagtccatccttggatgaatttattatttagtcaagagctctgatgaaccagtgtcttttttgttaggtttgaagaaaagccccaagcaccccaaaagggctgctgttgctggagtttcttgtccctccaggtcctaccaaattctatacagccccaaataagcacacaaagacttatattaattcttaaactgttgggagatggttaggacttcttatagctaactcagtcttaattatgtacccatttctataaattaagtattttcacatggtcttggcttaccggagaatgccaggactgttactccttcctcggctacatggcgtctcttcgactctttgaggtctctctctgcctacctttccctgaattctcctagtctcctaataccacctatcttcctgcctctattggccaaacagtgttttcttcatcaaccagtaagagaaacacgtatataaaagaacatccgccatcagaaaggcccactgactatctccaacatgacatgctgggctcagttcaggctagatcagtggttctcaacctgtgggttgaccccatgctggggggtcacatcacatattctgcatatcagttatttgcactaagattcataactgcagcaaaattacagtttatgaagtagcaaagcaatgattttacggttgagggtcaccacaacatgaggaactgtattaaagggtccgggcatcgggaagggtgagaaccactgggggctagaggatgactgggagatagggaacaagaattgctgatggctagatcagagtttattcccagagatctgtcaaaagtgtttctttctgccagaaggatttccagtttccctctgcctctggctgatgagtcatctggttccccattgacatacctatggtgaacaccaaagccacagggatcttctaatcccctccccaaccattccaaatattcaggctattccagttcacaggcttcctccacccacatcccccagtttcctgtatctctttataatcattgtatttgttgtgttttcccgcaccggattttcctgatgccccaccccaccccaccccactccactccagacagcttgggcagtttgagtacatttttctttttctctcaagagccgttcggtttgatggtctcactgtgccctcctttaagaatctagcttcagatttttctgatccccccccatggaaggcctcaccctccctggggagcagaagggggataggatgggtgggagagttggtggggatcatgggaggatgggaggcagagggaactgagattgatgtataaaataagattgtttctaatttaaataaattaataataaaaacaacaacgttaaaaaaattagcttcagcagctggaaaattgagcttcaatactggagcctttggaggacaattaaatcaggtacatgctacaacaattagttatgatgctattcctggctaaaagacattgaaagcctgagaatgttgacttcctttttaccaatatctgttgggaacattctgtggattgacctttagctggtgagagttcattatctcccatctgccccctagaattatttggccttaattacatcgttttctttcaccagatcactaagtgttccctgtttttatttgcacttcagttactctcagaacttcatggatccagactccaaaggggcttgtgtttctgtgccagtgtttgtgtttggttcatagctcctctcagtctaacaccagggtggtaatttggaggcagggtgctacagaagtgtgaggcccaagagaggttgtgttgcccttttgagaagctttctcatgatcctggctctttagtttccctttcctttgagtgcttgactgggacttaaagtggaagaactgccttgtgagagagagcagccaggggatacaggttactttctgtcagggagtatttacaaggttagggatcagagaagcctggggttactatgggctttgatacacaaccacaggtgtatggcagcagaggatcagatatcccctttgccacaggcaagaaaggataatgaaagtgggtccctttggcaacagaaaaccctgttcacaggttccaatggaatgctaccagtctctccaccagcaatagttcagcttgagcctgatcaagactgtcatttgggcgaggccattgactctgctgtctttggatgtttgtggattttccctttggacctaacagttgttgtatgtaaacattctgcttgctttgtccatctttccctttcttccacccacctcctggtttcttttcttctccatctttctcgtgttttcttctttcccttactcctcatttcttttctcttctagtctgtctttattttgtagctcaatcaactgttttcattatttaattgcaataaacaatcagtttcgggatagtagggatagcagactcccagctccatctaacactgttccctatttcccaaagtctccattcactacaaaaactcactcggtgactctatgttccttatcactatgcttttcaataatgtgagtacattgatggttcctgttcttgtaattttagtcattatatgctgatttcctaacacaaagctttccaacatacacaaacgtacatacctgcatatctgtgcacatatgcatgcacccacagaggtacccacacatgaacacacacagactggataacactaacattaatgtttgcatgaataactgaaaactgttccctaaccatgttgagatatcaaaaaactagcagaagctgggcatggtggtgcatgcatgtaatcccagccctccagatgttaaggcagaaggaatgtgagttcaaattttaacttacattatatagtgacttcctgaaaaagggacctattgatgttaatttccaataagtagtcatgacatgctcagtatatatttattaggtaaaatgcttacttacagagatccctagccaaccagcaggaaagcagagcaagctgaatcagcaaggaagagagggggctaccatgtgcgttgcctaactctttaaacttctcccatgtcaccctgacatcaccttgaccacaccctgactagcgtcttcaggcacacccggagccagcccttatgaggcatggttatggtgtctcgctccaggggaccattttacatcacacacacacacacacacacacacacacacacacacacacacacacacacacacacacacctaaaaattcctaaggctcacaaatttttatgtcaaaagcccctaccctgtctcaccaccttgccctacaaggtctgtatcacaaatcctccaggaactctcttatgaaagtccctcatttgccacatacctgagatcactgagtttttagaaaacatgtcactgcatagttttaagtagcactgaaacattgttcatgctacttaaaactatacagtgatatgttttctaaaaactctaaaaattgaaacattgttcatgcaataggcatttctttcatttcatttttgttcattagattttaaacatcattattcattagattttaaactacctgtttacattacaattttcttaaccagtacagattttgaactatccaaataaaatgatccctgttatgtttgttgtaatgacttgttttcttgattatagtttatcctttgatgtcattacttcatctaataaaggttctatttcaaacgtagttacatcggtgtcaggtccaaaggaagctccaattccctaaggtccaaaaggtggttcatctaacgagaaatggatggggagaggggatggatttgtaaatatgagtagtaattaaagaatttaaattaaaaaaattaaaaagaaatgagctcaacctgtactataggagggtttctggtggttagataaaatacagaattcctcaggaacttgtgaaaccagttcctatctgctaaaaggagtcatttccctcacctggcaggagggacataggaatgcccatggcaccatcagcccctgctggcctctaagctccatcagtatcacagtacctgttatatatttcaatgtccatgctgacatcctagctcttctcacctcctcttctactctaaatcccttccagattacagggttccctcctgtcggctgttcatccttcttataacatgggattcccattattctctgctcttacaattcttgctctatctatctatctatctatctatctatctatctatctatctatctatctgtatttctatttatctacttattctctcttattcccttactccctcttggttcatttgctatgtaatatctgggtatctccactattaattcctgctctcccatttccctagtgctggccatggtagtctttttccttctctctctctctgctttagattcttccagatatctttatctgtgctctctttctctctctcatatctataataaaatccttaaccctaccaataagtggtcatgtcgaccaatcaaccaactgtaatgctggctccagggagaccaatgccctttcctgggctccactggcactcacgagcccacaggcatacccagaaacacacacacatttttaaactttgaaaaagaaggtcctcactcccgttttctttaatatcatcatggcatacactggataatgcataatggatagaaatttatttcctcacagttcagaaggtcaggacaaaggagatggagggagtgcctttggcaagagcagtcctggtgagcaatctcaaagagagcaagaagtaactgctgactgacaagctgccccaaaaggcaggtcccaaggaagccaggtatatataggatgtcctaaggattatttgcctcgggattgtcagtgaccacggcaggtcatgactttcagaccatttcaggctttggaaaaaagcaaagatctaaagtttgtgcttatggattctgatcaatgatttgggttactagtcactctagttactaggtgccaggcatgattctagagcatttcatacattcacccacccaaccctcccatcatcatgatgatttggtagcagtagggttcctaattcagaacaggagaaactaaagcagagacaaacagagagccacagcatagaaatgcagagggatgggtatcggatcccaagttggacactgtgtccagtcatccaacatctgcatttaggatccctgccacgctatggagtgtgcacctgtcactgaaggaagggaccttcagctttgtaaatgagtcagagaaaaatccctgcccagggagtagaaaatgctccttgcagtggcctgtgagccataagggtgatgagagtgaggataggcaatagtggcaacatagggcaggatgctgaggtaaaggtttccttctccaggttgaataccatctgtgttgcaaatcaaagacatcaatacttctgactcatagcacaaagttggacactgagaggggttggctctttttcaactaatttgttcataaaaagtgacatcagttttactttctggtttcaatttctcttctgtggggtcagctgccaagaaacaggaagagaaaccagcagccactgttatatatgggtcagtagcacttcattagaagtctgaggacgagattgcctggagcgagctgcagcctgcactgagcccttcaacactgctgggagttgcacagcaaccatgaggtatgtcttcccttgctctggtggtgaggaggtcagccctgctgatggctgcaaatcctaagcagccacagtcccacgagaggctagttgtgtttctgtgtttgtttattgccttgcccacctctgtccctatagctgtaagtatgtcatagagatagatgctcagttgcttcctccagatctgcttagctggcagctgagaactgaggtcagagacagctgtttgatctagcagggacttcctgtaaagacagatccagaagaattgctcttgtcaattctctctctctctctctctctctctctctctctctctctctctccctctgtgtgtgtgtgtgtgtgtctccttctggttgcaaaattaaattgggtgaatctaatacaaatattatttaagggaattgatctttttagattactttattgttaaagacatacttagactactaaccctgcttcctgcacatctgaattttacttgtagttgctgaattaatctcagaaatacatgaagcttgctaactaaacacagcacagacaagaaggaaggagcttgtctcactcactgcctttcagatctatttcctttctggtaaccctaactctggcccaacaaaaaatgtgggtggttgcaagatgtaaggtaaaaagtcaaagagaggggtcgagtacagtcaatatagttcagacatgatctttgtcacttcatgtggctttctagctataaattttataagtcagaatctgtaatattagaataaacagctgatgtatagatagcatggaaaaataagagagagaataggtaacatcctagaggcttctgtactgggttagtttgtttcctgcttatttccttatctgtttatggataagactgaagggaatcttacaggatggaaaaatctttaagagtcacaagggtaccctgaaaaaaaaaaagcgttcttcccccacccaaaaggaactgggtgcttataaacctgccctgcagcaaacttcctatctctggtataaaatataaaccttagagattaaaatcaaaagtaaattaaaataataatatgaaagtattaataataattttaaaaagccaggtgttggtggcacacggctttaatcccagcactcgggaggcacaggcaggtggatctctgtgagtttgagaccagactggtctacaagagctagttccaggacagctccaaagccacagagaaaacctgttttgaaaaaccaaaaataaatagatgtattaataagtcacctgagtgagacagcatcaatgcaagaatttcacctgaaatgaaagtttgaggtgttgctcacatatataatgcaattaatagcggaaatgttgcaataatggtaaaatccataatgactgaaagtaagatgcaaacaaataaaatgagcagatgctcaaaggactttaggattatttcagattgtccatgtgtgtttcaaacaaacatgttttttcctcacaaaacaaggaaatggaatcagcctacaagtccaacaatgatgaatgaataatgaagatgtggtacataccatggaatttttattcagccataaaagaataagtaaaggattagcctctcccagggatgagctatctgactggttgcttagtgttcagcccccaaaccacacacacacacaacaaaagatggactcacagactgtatttatagatttgtacatatgttttgtatatatattcagaaatatgtaacgatactcaaagaaaaagaggctattaatttgagaggaccgaagggaggagacacatgaagagctggagggatagagggaagcgattagttatattttaattcatatgtatttctaagagaacaaaataaggggctggagagatggctcagaggttaagagcactgcttgctcttccagagatcctgagttcaattccctgcaaccacatggtggctcacaaacatctgtaataagccctcctttggcctgcaggcatacatgcaggccgaacacttcacacataataaataaataaatctttttaaaaaagggagagagaacaaaatgaaatcatgcgatttgcaggaaaatggatggaactagaaaataccataataagtaagaaaatccagatttacagccaggtgttggtgatgcccgcctttaatcccagcactcaggaagcagaggcgggtggatctctgtgagttcaaagccagtctggtctacagagtgagttccaggacaggctccaaagcattacagagaaaccctgtctcaaaaaatcgaaaagacaaaaaaaggaaaaagaaagaaaatccagattcaaaacagcaagcatcaaacatgcatgttctctctcatttgtaaatcttagctttatatatttttatgtgaatgtgtatcaggaaaatagaaatgggaccaggatcaggagaagacagaaaataggcattaagggctggagtgatgtctcaggggttaagagcactgactgactgctcttctagagatcctgagttcaattcccagcaaccacatggtggctcacaaacatccattatgagatctggtgccctcttctggtgtgcagatatacatggaagcagaatgttgcatacataataaataaataaaatcattttaaaaaatcttcaaagtttgaataataggaaatagaaagcaattaacttttaaaagggaaatgaaggagctaaagtggatttgaatttctaagataacaaagaatttagactcagcactatgaaatgtcaatagcatacaaacatagctaagatttttaaatcttaatggtatgttagaggttaagagtaaagaagagattaaattactatttcttaatttacaaaaaccttcattagcaatactggagctgtgctggagttcaaagacgctccaaagcaaaggcaagagctaggaaatatagacagtctctctaggaaaccctaactgcatctaggactgactcacttccttctgtcaattctgctgcccaaatgagcaaactcttgcttccctatgcagtaattttgacatgtgccaaatattggaagaaaggaaagtgtgtcccttggtgaggtttagattaagactgttaagaaggatgagaatatttgctgtgatcctactccttgccaggtgaatgtgggatgtccccaaatgactgtttctttatttttttctgtcccacagcacaaccactaagaaatccttggagagcaagctacagcagctaaaatgccatttcacctggaacttgatggcaggagacgagtcattggatgagtttgaggacaaggtgtttaacaaggatgagtttcagaacagtgagtgtaaagccacaatgtgcaacatattggcgtttgtaaagcaccgcagaggccaaaatgcatcagcactgaaagagttagagaaagctgaacagttcatccagcaacagcatcctgaccacgtagaaatcagaaatatagtcacctggggaaactatgcttgggtttactatcacatgggccaactcgaaaaagctcaggcttatcttgacaaggtgagacaggtctgtgagaagttttccagtccctacaggattgagagtcctgagctggactgtgaggaagggtgggcccgactgaagtgtacccgaaaccaaaatgagagagtgaaggtatgttttgaaaaggctctggaaaaggacccgaagaacccagaattcaccagcggctgggccatctcaaactaccgtctagacttctggccagcacagcagaatgccgtcgactctctgaagcaagccattagaatgtctcccaacagcccttatgttaaagtactcttggccctgaaacttgagatgaatcaggaaaaccagggaaaggaactggttgaagaagccttgagggaagccccaggtgagacagatgtactccgcagtgcagccaggttttattataagacacatgataaagacagagctatacagttgcttagccaggctttagaactcctacccaacaatgcctatgtgtattactatattgggtgtttctataggtcaaaagtccttcaaatagattccagaagagaaacttcacagaatgagaatagagagcagttactgaaacaagcaatttattacttaaagaaagcagaagagaccaaggagatgatcaaagattcctgtagctaccttgctcatctttatgtcctggcagagcagtacaaagaagccgattattacttccagaaaggattcaagaaggaactcactcctggccttaaacagttgctccacctacggtatggcaattttcagttttttcaaatgaagtgtgaagacaaggccatccaccagtatcttgagggtgtgaaaataaggcagaagacgaagcctaaagaaaagatgacaaacaaacttagattcattgctgaaaggagacgttctcaaaatggatttgactccaaggccttgcacatcttggcgtttcttcaggagttgaataaagaaagccagcaagcggccaaagtctctgaaaggggacaggactctgagaggcctgttttttcaccgtctttgcatgaggggggaaatgaacagtagtaaactggtgcccacaaggctactgctggaaggaaagtagaaacccttaccaagtagccattcagaatacttaacaactacatggaataagcatgtcctaacaggctgactgtagtatttatcagggttgctgggaaccctgtgatcagatgttggcacctaaatctctggatcatgtaggggtctcagaaagaggccagttggaggcacagacacagaggcctggcaaacagtctagatctctttctatttcttagagatagtttccatggtagcaaattttcaaaccccctctgtggatttgtcttgggtttgtttctgtatttatgtaaagcagtcaaattcctcctatgggtgagtttccatccttgagttattgctgatatggcacagccttgttctacataataacagtgtccatcaaaaaactgagcagtggctcaggacaataatcccagcacttggcaggaggtgagacaggaggattacagtgagttggaggtcagcctgagcatgacctggaaagggggtgaagggtgttgagaattagacatgtaaatattaaatgattatgtacgttgcttgttagtttggatatgtatatgcctttataaccactatcatcatatgtttataaaacccagaaggtagtgattttgttttactgcataattttgaaatttacaaaatagtgctcaatattaattgagctcaaaatagaaactcaatagtgagttccaggtctaaaaacaaacaaaccataacaaaagctgagggaccaaatcaatcctccctccaattgcccagccagtcctcaatctaccgtgtcccataaacatgagttcaattgttccattaactcagatggcaatataactggaaaaactgagaccagaggaagttagaagggcaggccatatgtgtgcaaagcaggaagtcaatgccaaacttccaagatgcacacggagggactgcttcctgactctgctctatttgtgagtatgatgctgcatgcaaataaggggcattctgtctaccatagtgacaaatgaaatgaatatttattccaaacttgtgtggaaactcctgtgagacaaagagaatgctgatttgcccttgacaaatataaacccatgaggacaaagtttgtagtcactattagtcaaatgaatacttcctttatcaaaaagctatgatgaacccatatgacagacactaggaaggccaccagatgggagaataacttggtgactgacggcctggtggaaggacttagaaaatggaatgggtattggagggtgaagtttttcctccattataaatattgcatagtaagagacataaagacttcttggaactctgaaaaaatactcaggaacatcaaaaaattgacaattgacatttcctaggtaatccttgaatggaataaactttagggttggtgtgaagcagcatcgagtcaatgagcccagtatgaggctggctctcagtcaccctctggagtggaaaatgtttctctattaggattagtttgcctttatgtacataggaacattttattcagcaattcaaatatattagattcgtagactgttaaaatgaacattctgaccactggaacaatgttccatattattttaaatgttaaaaaattttgtatgcatttaagtccatcagtttttagcatttgaatttctggaaaaatactcagctttgttcataaataacatgaggtagaacattaagcagtgctctggttcaataaaaattttactgtactctcactgtcttagactcaagtatgacaagaaagagtagcaaaatttttttcgcttccttgagtgtctgtctgttctttttatattagatgtctgatactatgcatccagtacacagggacacactctgtcttgacttttatccttgcttgcactcctgttgttgtttcaaaacacaagcaaaccaacttgaagggcttatttggctaataacttacagtccatgttgagggaaatccatacaggagttcaaggcaagaacccaaccagagaccctagacagattttaggacatagtttgaccacatcttcagggagtggcattccactccctaaggctgtaaggggttgtaacaaattgatgagacagacaggaaaacatctgatcttgctatttcttaagaaggaaatctggagtgccaaccaacctggaaaggaacatagagatgcctgcagtcttccacagtttctagagaatagttgggtcaaatgacgttccctggcctcagatattttctgaaggaaaatagcaccattgtgctttgtgtgaccttgaagatgctgggctgtgaataggcttccatgctgaaatgcaaacttgggcctgttatcaaagaagctgtaacagtgaaagcaaacctggcattgcagttggcacttgtgtgccctcctgccttgcgtcccttggcttcctatttcagtcttcagcatcagtcaggagaggtgatctggccacttttctcacatctttttgcatatactcgaggtaagtggtgagtccctgacaaagctgctctaagtgctgacaaacgagcctggaaaatgataggactctatctgctgtttgtcttgctccaaaccctacacatcaacattatttgaccacaaaactgcttctgtatgtttccagtccttgtactaggttggtactctgagagtatgtcagagtctcaggtgtgtttgtgtgagtgaaggagagagaagacttgtctcatctccagcttgctttcaaatcataacttcccttggggaaaagcccctcccagcttcttcttgtagccctctttctcctttaggctcagaggcagtccctgaacagcagactgagtcatgattgctttcatatccccccacccccaacagttttcacttgctgtgacaaataccagagagaaataataagaacagggagctttattctggttggttgtttcagaggtttcagaaatgatttgttggctttgtgttttctgggattgaggcagaaaaggggcatgctgaagagagcactcacgttgtagaggccaggaaggcaagagtgaagcaaagaatgccttgagacaaagtatcatgccaaagtacatgtgttcagtgacctacttcacaaatttccatcactttccagtgaggccatcaaattaggaaaccatcagtggactgaactgtcagagccctccagacctctcaccgtgggagcctttgtggaacattccagatccaaaccatatcagatcatgccagtagactcacaccatactcacccagtgagagcagaggacatgagagtgttacagtcccagtgagacttattttagcatcacctcccatggataccatcagcttgacactaactaggaatgatagatccaactaaagactacagaacctgggtcttcttttctcacaacactaccccatcacctatttcagagaagggaattagacttagcaaataagttttccttatgatttacagtgtagctgcctaaatgttgataatcttcactttgtattgggtgtgggggggagatacagagaaaaactgagattcttagatgcacctaagtgcagcaggtataagacattctcagttgtgtactacaccttcccttaggtgcctagtacaaggatttaagattagaaatcagaatggggtttactaaaggtttgtgaatctaaatgccaattctgcctttcctcttcgttgggccagtcttacaaaggacaatatgaaacctacaatatggaacaccaacaccaaggcttccttccattatggcctcatcagttttaaaaattggagcatgcctgagtttgtgtcatttctgaatggatggatctttttaatggaaatcccattccatcctgaagatgggaattcctgagatccttgtagactgccgcatgaagctctcaactgtttgcacagatgacaatctaatcaagagcacttaggaagcctctctgcttggcttccagcaacctctgtctttaaattaaataatgggatggaggaatgattcggaaattgtttgttgctcttacagaggatcgagatacagtttccagcacccaaagcaggtgactcacaactgcctgcaattctgcctccagggaatctgttgcccttttctggcctctaagaatacacatgcacttgtggacacacacacacacatacacacacacacacacacacacacacacacacacttaaaaataataaaagtgtttttttttttggttttttgagacagggtttttctgtagctttggaacctgtcctggaactcactctgtagaccagattggtctcgaactcacagagatctgcctgactctgcctcccgagtgttgggattaaagacatgcactatcatttgcctggcaataaaagtaaatctttaattaaaacatacagttcatttaaataaaaagaataaaaactaaaattgtgtatcttcagactcatggcctctagtccctaaccccatcacaatctggttatagccctctgcactctgattcttgagttcatttttttattcttcatacacatgaatattttctctgtgtccaggctgtttcactttccatgacattctccagacatatccacattgctgaaaattctcagagtctctgccttttaaagactggggagtattccattgtgtgggtatgtgtgtgggtatgtgtgtgtgtgcttgtgtattccactttgtatgtacatgtgtgtgcttgtgtatcccattgttccattgtgcatgcacatgtgtgtaatgattatatatatatatatatatatatataatatatatgtatatttcacactatattttctttatccattcatacattgatggacacttacgttggttcctgtcttagtcagggtttctgttcctgtgaagagacaccatgaccatggctactcttagaaagtaaaacatttaattagggtggctcacatagtttcagaggtttaggctttgtgcctgctatctcgaagattatctgttggttatggttcgttcatgacttcatgctgtgactttttttcatagagtgacaggggccttaaatgaaaaggctgttttcttccatttagttcagaaaacagtaccgagtggaggagaattcatgcccctcaggtgcttgattgagaaagatagatcttaactatgccctgataagttatttatatgtgtaagataagtaattggatggcttcttctattgactgcaaccatttctgaagcaatgccaagtgcttgaaattgtgtttatggtatgatgttgaagagatgagccagccttctgtaacaagattgaagatgccatgaaaatgcctaacctatgaacatgtatcctgtgactcatcttctgttaaacacgtgactgtggacatataacatgaaatgacaagcaagggctgagaagatgcctaagccgaggcaagattctcacagatatctttgactttaaatgtttgatcagtttgattagttttgcacatttcttaaaggggaggttcttagtttactataataaatttcaatgtttttttccactgatggggaaaatgattaatgtcaaataatattttctagttgccacatgcaattgttactaatatatggcaaaatcaagtgtacttcatgagccaggaactagagtaaaacaagaatcaagaatatggagaagtcatcctacaatagtagaaaatatttcttatgtaaggttctccgtagggctggagagatatgtctcagcagccaaaaagacttgctgctcttacagaggacctgagtttagttcccagcacgcaagctgagctgctcggctgctttaactctagttccagggtacataatgtcctctcctggcttctgtgcattcaagagagagagggagaaatctctaggtcaaaatcaggcattgagttctgaataaaagaactaaatatgattcttgaaaatgctatacttttagtgcctttgctaactgaagcctttcaaagcatagtctttgggcaaatgtagtggagctaacaggattgcacttaacctcttgtaccattaatagcagcaagttgctaagtaaaacaaccaatcagaatttcacagctatctatgttcatgtcatcttcctgctacacagcagcaatgtctgactttgaactctaactatctcatgggactctgtcttcataaactctatgtgtcaagctagctttgccagtgagtctttgcttggtgctgctctaggctggaaaagctgggaaactaactggctgggtcataacccatctcggcattaagtttctttttcctcttctgatgattttaagtcagtttcactttccagtttcctcttccctttcacaaacacaagtccttagaaacaggagagcatcagctggtgcactcctccctccaccgctcccctgtcccccttatatagtcctctgatcatccacctgatgctgactgagattcctgaagggtgcactccacatccagcttttccgagcagttgcaggtagcagtcatgaggtcagtgcaatctcagattctcctctgtagatgatacatggagctgctttctgcgtggaagtctcttaagttgtctggctgcttacagattccacacaactaaatttgcatggcttttgttgagtttttcctttgatttttgtttctctgtaggcttgggcaaggtcctgcagcttctaaagctgctcgctggatggcgctaattcctgagttaagagaggttttacaggcatggcttgatccactcaggctcaaaatttgactcaaagctagtactaatggaattgctctaacgggactttgctcttgctttatttaaagtgaacaagtcactgggagctctctgtgtgtgggggcgtgcaggggagggtgcgggtaggaaaggaagcattctttttccagcaggtagtgtgagagctgggatcagtactgcaaactcaggtcaagttgctgaaatctttgatcacttcagggtcaaggtagagaaaatgatttttagagataaacagggtttttgttttgttttgttttgttttgttttgtttttcaatttttacatgaaaccaagtctcaatgtttaaagtttcattttactactgtgaaatgctgctaggaagcctaatttctagttatggaaaatagaacagtgagtgtctaaaggcaatagggatagaatatggaatgtcagaagtagcctataaggactctaggtgggtccataggcataaacatttgttgagactcagaaaactatacccttaaaataagtgattctacggtaagtaaagaaaaatcatagtaaatgtgattttcttaaatgtaactacatctgccgagagtctgtcattgggagagcctcagagagaattaagaagaaatggtacctttcccaccaatttcctatcagggaatgattgtggtatcaatggcccagggaagacagatgctattaattactctgagagagaacaaaacaagacagtcatccctgccctcagacccaagggttacaaatatttagcaaggtcagagttgggatttgaattccaactactctgggttcctccttcctatataatggccctgggagaagactggtcttagtggtgaatatggttgaccagaaagccaagacctgcctagaacctcggtggctagcctgaacaagaggctttgctgtgtttcgtgtttgggtatgtccagagtcaccaatctaagaaggtctgaggagaaccctttagactatgctggtcgggagtctacatcatggcattctgtgaggactgaggcagcttgagctgctctttcctgtcacgataaacatcacaaaatggggcaaataaaggacctggaaaggtacatggtaccttctgtgtagactgcgtaggaggcaaagtctcatgaaaagctcttgttctatgcacagatgtcctcgttagggtctttcagtatgcagaaattaaatgttcatttgctcaattttctcatgacctgtctcaccaatttgggtattatgcctgtgtctctgtattagttactttgcttggtatactgggacaaaagacctgatgaaaatggctttagaaacaaagggttattttggctcacagtttgggggtgaagtcttggttagaagtcatggcagcaacagcataagctggtggcaccgtgttcagtcaggaagcagagataccagactgctggccccagcttgttctctctttttgtatttagtcttggaccctggctagtagggtcgtgcctcccacactaggatcagttttcattgcccaattaaatctttccagaaacatctttctagacatacccaaaggtgtgtttctattgtaattacgaatctcaacagattgaaaactatcatagcatctttcatcttggcagttaataagaggaactagagaagcaggtgagaaccaaaggcaggggaggccttgaagatacatgagtatctttaagcctctttaagaacaatctggcccatgaaatctgagagctaagaggcagcccctgaggttccagttccaccataatttcttatatttaaaaaagactaaaccagaatttgtggatttctgttttgtggttatcttatcagcatcctgacttttcatcaagtgtgttccttattaattctgtaatctaaatctccagtatgtgattaggacacttagaacttgaatttaatttttttattttactttatcttatgttttgttgttgttgagacagagtctaattttttcaccctggctggcctcaaactgacagagatcagcctgctttttccttccgagtactgggattgaaagtgtacactgccacactcggctttggattttgttttctcataattggggagcaagctatcaggaccattctcttagtgacctgctaggtttcctctaccctgttaagtagaaacagagataaagtattactgtcactgaaattgcactatgcttgtgctctatcataattgactttggtgtgattaaaatgcaaatttcaggaatttctaaatgattgaaagagtagatctgagataaggctaagaggagagggtcaagggatggggctattttaaaacggccacaagtttgtgcatatgtacactgaaatgtgaagatgcagtattcaccaccaagtctcccattccttcactgtaaaaaaatgccgcttgagtcaggtgtgtgaaactgtgcacagggacaacagaaagaggtggcttgtgggaggagcagaaagggtatggacagaaacaaatcttgaatatttaatgggtgtttgagaaactggtaattggaaagaatagccagaaagcaaatccagcctggagcccatggctcacactgtactctgagtccaacatccacaagaagatagttcatttttcagtctcctggggctcagtcaagctatcatgtaaaatgaaccatcaagggatgcacaagacgatccaagtgaccatgtgtgttttctccacagtgaggtcaccaggaactctctggaaaaaattcttccacagctgaagtgccatttcacctggaacttgttctgggaaggaagtctctcaagtcatgtggaagacagagtgcgaaaccagattgaccttttaaactctgagcacaaagcgacaatgtacaacttgttggcctatataaaatacctggatggtgaaaaggaggcagccttggagtgcttaaggcaagctgaagtctcagtggagccaaagcaggatgatcaagcagaaattagacatctggtcacctggggaaactatgcttggatctactaccacatgggccggctctcagaagctcaggcttatgttgacaaggtgagacacgtgtgcgagaagtatgcaaatccttacagcgtggaatgtccagaacttgactgtgaggagggatggacacgcctaaagtgtggaaggaatgaaagagctaaaatgtgcttcctaaaggctctagaagagaagcccagtgatccagagtgttcgtctgggctggcaatcgccacaagccgtctcgaagaacagcccgagaagcagttcgctgtggatgctctgaagcaggccatggagctgaacgctgagaaccagtatgtcaaagttctcttggccctgaaactgcagaaaatgggagaagaagctgaaggagagcgactgattgacgacgccctgagaaaagctcctgatcaagcggatgtactgcaaaaggcatcccagttttaccagaaaaagggtaacctagatagagctaacacacttcttgtaagagcactaagatccacagaaaacaagactcccctctacaccctggtcatgtgccgttacagggaaaggctgaagcaattacagaaaaccggaaatgctggctccagtgacagcctagagaagatggaagaactgagacaattaaccatggagtacatgcgccaggctcttcagaggaagcaaagtcgtctgaactcctactcagacctcatcgattacccagaagtaaaacgatgctgtcagttggtcttcggcaaggagagccccagtgctgaagaacaacagctctaccagagctattgcaacctccaggaatatcaccagcggtctgaaggccttgctgccctgaaggagttactcaagtcctgcagtctcacagaaacagcatccattgagaaggaagggatgaaggagcaagcataggccaaagatgaaaacgttcagtggcaaaatgtgctggattcttggtctctctggggaataagtcagaaagctgagtgagtgggggggggcactctttggggcacaggcagcctttccttgaccgcatctgagcctgaggataacaggaagtgtgcctgagtgcaggcgctcaagtctgcactgtaacagaagtgtgctgtggaatggtgcctactgggtgtggagaggcagaagccctcctgtcaagtgttgctccacaggattcccttgcttaattatgttatcaaacacctttaaagaattaaagaagccaacaggtcttcccatgagtcacccagggaaacaggactccaggctcacataagcactttttgatcactatttttgtcctgtaatgcatggcaactgccagcaaaaattagttttaatcttcattccctttctgtgtagccatcctaacctgaaagattagctttggcctaaccctagaatattttttgctccttttttttttttattccaccttgagtttgtttgtgttcttgacaatgatcctatggtaactatgtatgacaaactggaatgatataataaatctaagtttcaactcagaatacggacaattgtgtgtgtgtgtgtgtgtgtgagtgtgtgtgtgtgtgtgtgtgtgtgtgtgtgtatgtgtgtgtgtgtgtgtgtgtgtgggtggtggtggtggtggtggtggtggtggtggtagggacagggaatgaagacagtaatgttaagtaccaaagtttcttcggtgaacactgggggtggctaatgtgagctacacccctttctgaggagtgagtggcagttatttaagaaagagagaggacaagaagtcagaagggaaaacatgttgaggagtatcaggagtatagagagggaggtgctggggataggtatgaccaaaacatattatctacatgtgtgaaaatttaaagactttttaacagtttttcttccgctaggatgatgtaaaattgtgaacacataacatgctgcccaaagcacatctttttgaagatctgtctggacactgggccaaatccatctataatcagcatagttaggagctgccactctccttccagtcaagattcagcagaggtctgtgcatgtgagcagatgattctttggccacattttaggggacccagagataccctagtgaatgtccccccattggtgtgtgtgggcactgatactagactcgcaggattagttctgttgaggtagcactgggtcattcaaacttgtcagtatctggcactgagagtttcatttcactcagccatcagaagcatcttccaactccccttactcttcctttgcagactgtcatgctgctactgttttcagacatggtttccctgagtagcccaggttggcctggaatttgctgtctagccaaagcttgtcttgtattcaccattttctggcttcagcctagcttgttctgggatttcaggtatgcggacccatgctcagctctggagtctctttttaattcgtttatgtgatggggaatgtccttctgtatatatgtttctcttattggataatgaataaaacactgtttggccaataagacaggaagataagtgggactaggagatgagaattctgggaaaggtaggtggagagagctgccaaaagcagatgacatgttgccgccaaaggagatacaggtatctggtaagccaagaccatgtggaaatacatagatttatagaaatgagttagcaattaagacagagctagccaataagaacccctagccatcggcctatggtttcataattaatatagtgtctctgtgtgcttatttggggcaaggggcctgcagaaccaggcaggaaatccagcaacagttatgagtataatttatagccccaggttatacacgaaaaagaaataacataaaaacgagattggtatttgaataaatttctttcccccagatgaggaactaaattccagaaaaaaaaactgtaattctgaaataagttactagttagtttagtaattggaaacattttaggatctatgtaagtggtgaggatgtcaagatcatatatgaatttgtttctctgaatccaggactgtgcaaaaatcccatacaaagaggcttctggtagatacaaaatacacatatcgaaaaacttgttccttatagatattttgagacttacaaaattctatatctaaagagtaatcatccaggtatgtatggaaacacacttctgcaaccccagggaaatggacggttccaggccagcctagactacatggcatgttttagctcagcccgaacaatacaataagaccctatcttaaaaaaattaaatacagagggatgacaatgaaacacataaagatgacaataatactgaaaacatttgaaagagtagattttgagagttattactataaaaaataagtactcaaggtgatttatagtaatggatgatgcagccattccacaacttgtatgtatatcagaagaccatgttacagcatatacatataattttaattgcaagtcaatcattctttaatttgaaatgagattcaaatataagggacaatagcagaatgaataaatttacccagaggccaaggattcccttgtcaagtacctcatttgtcatggtttagttcataattctaatgaaatgctatataaaatggcacatgtcactcagaaacacaacagatcatcagtattataagatggcagagggaagttagaacagtcacagcaagcaagacataggagtgtgtatgaaagggactgtgctggctcaattgttacctagtaacaattgctaatagcccctaaacttttctcattgaaaacgactagaaatgacttaaaagcaagcacgatttcagaaggtgagagtgcacatctgagagtacagggttccaattactattacctctagtttctttcttagtatgacattcctgtagctgaataagacacaacagtaattgtcatgtccccacagcacatattggcacacatattggcagatggtagacatcatctatcaattatttatcaagatacagcaaactatttcaaatctgtagaatacaataacagccattttgtttggttagcattgaattaaaagggcagcagagttcagcttgagagttctttttaccaggttttctgcgagtctgcttttttgggggggaggggtaaagtctctcttgctctatctctcttacccctccttccctcactccatttcctaccccctcactgtgtgtgcgtgtgtgagtgtgtgtgtgagtgtgtgtgtgtgtgtgtgtgtgtgtgtgtgtgtgtgtgtgtgtggtatactcagtctgtataatattacatatatgtgtatgttttcagtgctgaccatttggtattggatatgcaattgacgagctcttcctggagaaggcattctcaatgtttctagttgcctaggatttgggcctcctaagcgttcccacttccacatcagcgtgcctagtggtgtccttgttcagctcatgttcatgtttaggcaggtgcatgttgtgagactttataagcatagtgtctctgacatttataggagacacaatctcacaccaaacttcctgtcccttcgccttttaggtgttttctaccctctcttctgcagggatccctgagcctcagttgtgatatagaagtatatgttgggacttggcttgataactgcatttacattgattgcggttttctctgtctgtgacaaagagaattgtttggatgagggaataaatagtacactcatctgtggtttaggatactggtttagggattaggctgctttagtaaagtggcagttgtgagtctcttctaagattcatgacttcacttttcttggcagttggataggtttctagaaccaagcatgactttcctcttgttgagcaagtcttatgttcaattagagaactattggttaccaccaaggtatatgtgtcactattgcatccttaggacgatcttagcgccatactggtttttgttgtggtttgtgagtatcatagcttggtagtactaccgattgcttccctcctttggcaacctgcacagcaccttctgataccatgaaagctagacctcctataggaggctttcctgtcagacctgccttgggtctgttgggccctaagtccaaggtgcatggtgtcttcagcatgcactttcaggggacaatcaagagcagccgctacagccttacaatgtttgggaatcttttagacaactctgacaaaccactcaaaagggggcttcttatgcctggtattgggatttttgtttgtctatggcatttgtttgtctatggcattttgtttgtctatggccagggggtggagggaggacgttatcagcccaagtgggaaatttaactctgtatgtatacattaacttacatgtactaaaggcattttaattatttaatggtatgattgcttatgagtttttccaacatccttctgatattttaccctcctttcccccctatattctttaagattcagtagtgtctgtattcccaagccttctttgatttgaccctcctaaccctgtgtaggttggttcttgtgtattctgattccatacaaacatagaatttggataataatgtcacaaacaaaatacactcaaaattttgtgatattagcagatttcattgaatactataggctaaaaattaaaaaggtaatatcacacaactctcaacaatctaagcagtatcatgaagctatatatgtcatttttagtttgcacattccaaagaggctaccccctccctctgtcatccccaaatactttgaaagttttcttagccgtaaataaatatcattgtatttggaccacatacattcaccacaattgtctgagatcagaaacttgatataagaagttgcactgattataaggttgagctcgttgaccagcgggctatggctattgtagtgcccatgggaatggaagtgtgcactggaatggcgtaggggaatcctgaattcctctccttttgaatgttcatccttgctcatttaaattgctatcatgtattgctgaaggccagagattcctgaagcataaaaaaataagccttccctagtaaagtgtcctttgatcagggtactataggcctgagggtgtaggccatgcacaccaaaggcagctcacgggtgtctagaacagcaggaatcaaccatggacaatgagtgcagcaaaataggataggagaatggaagctcctatcgtagacacacagatccaagaaaaaaacaaaacaaaacaaaacaaaaaccaaaaaaaaaaaaaaacacacacacaccagccaaacaagcaaaacaaaaacagggctgtagaaaggcagaatacagattaggagtcctctccaacttgcttcatctggttcctcatatttaaggcaacagccacaaaagagtagtagaataatgagccctgagaatgcttactaagtcatttgatgagctgtgcttcaaaactcagggttcaatgcttgagtgagtctcagggccttctcatagcatcgcagagcctcactcatgtcccctctcagtttgtagacaaatccaaggaggctgatgctctccacaacgtgaacattctggcgaatgcgtctttcagccagcttctgcaaagcctcgagaagcttgtttctgacataggaagaagtcacttctattttcagaccctttatataatgggtgatagctctgtcttctgatctcttacaaaactgttggaagcggccatagcggaaatgaatatcttgcagaatagtaacatcaaggttcctcatgctcaacactttctgaaaattgtcctctgcctttccaaattggccagtttctatgtacatttcagccagattaacataagctgtgtcatatgtgggtctcagttccaaagtcttttgaaagtgaagcatagccaaacggatcaattgatctgctatttctctatcctgacctctaggttgcatgtttgtagcttcctttatttggatcatttgcttcttatagcaaagcccaatctggtaatgcaagaaggcagataaaggtcttgcctgcaaggccctgtataggagactaagagctctctctacaaaaccttccttaaggtaaaatttggccagatatccgaacacatagggttggcaggatgtgttggcctgagcttcttcaatgtacattcttgcttcatctggttttcccaagttctgaagctttagggcaagaagaactttaagataaggatcatctggatttaacctgacagctttccttaggggttccagagaaatactattgtcattgaaatcctggcgataggctgcaacagcatagccattgttgtagtcagggttttcaggctccactttcagagcctttgcaaagcaggccatggctcgtctattattctgtcctccacacttcagcaaggcccagccttcctcactgtccatctcggcacactccatcctatagcggaagggacttgaaaattccttgcaagtgttctccaccttgtccaggtaggcctgggcttctgccaagctgtccatgagataatgcacccaggcacagttaccccaggtcaccaggcttctcttgtccagttgctccctctgggtcagggcttctgcttctttcaagctctgcagggcttcctcatgctggcctttcaggtgcctcacataggccagcaggttgtgtatctgcatgctgttgctggtgtcaggtaactcagtagcggagattctcatttctaagtcaggcatgtccacatcttctataaccaactcccaagtaaagtgacatctcagctgaagcaggttttcttgtatgagatttctctgagattcttcactgtaaaaacagacctcagttactgataccttttacacttatacactctgtgtactgaaaaatcaagccagcaattaagccaccaaacaccctccactcaatatctctctctgctgccagtatttattccctctgtgtatttatctaatctcttattctagggagtaactttacataagaatttggaaaattcaactcacttaatggtacaatacttgattaggaaaggtctaaagttcgggcaaaataataatttcattgatgtcagtagaatttaactcctgtgttggttagttttacaccatcttcacacacacacgcacacacacacacacacacacacacacacacacacacacacacacacacacacactctatagccattaaggaagtgggattgtggactgagaaaatgtttccattaagattggcatgtgtgtaaggtatttttttagttggtcattgatgtgggagggaccagcttatcatggtggtgccatccctgggtagattgtccacagttacataagcaatcagactgagcaagccgtgaggggcaagcctgtaagcagcattcctccatggcttctacttcagttcctctgatacctctgatacctaaggttcagagaacaacgaggaagaatggtctgaaagagtgtaagatccagaggatcaggaggcctactgtgagaggatgtcttctagtttcgacaaggttgctgtgcccatgcaaactcaacaatatgcttgcataaacgtgacttgcataatgatgacatcagttgacatgtttaccagagaagggaaaaatttcacacgtctccacttctagatgaagaaatacaggtagtcaatggctactgaggggaaaaagaaaaaattttctccagaaacaagcccttgataggctatctaatcccaattggtcaccaatactaaatgcactcagtgagagagagagagagagagagagagagagagagagagacagagacagagagagagagagagacagagagagagagagagagagagagagagagagagagagagagagagagagaatgtgtttactggattttcttacacaagagaaaaatttatatgccatcaattgcaaaataaatagctctgtgggaggagggtaacactgcccttcttgctgttggtcagaggtgttttagaggcccccaagatgatccagggtattgtcattattcttgattgtccaccattacgtgatggtaggactctattgctgaagacaccccacacatcagcataagaatgtggagaaatcaagtcagtgctgaccaggagatttctcccgcactgactacttctcacagtactgagagatactgtgcaggatactgggggtgcaggagttgtcaacactcttcctcagatgtgagccctgtgaacttcaataatgaccagtctggcaagatatggtcactgataccatagtgacgagaatgctatggaacaaataaccactttctaattggatctgaggtccagttcaaaggaggaaacacatgcctggtactgcaagtctggccaagaacacacggctggggaacttacaggtcctgggggtggccctcctactattattttgccaaatggacatgatatcaaactttcctctaataatgtattctctttatgcataagatagttttgcatgcatgtatatatgtgtaccacattggtatctaaggcagtctgaagaaattatcaaatcctctggcaccagaattacagacagttgttagttgccataggggtgttacagcccccatctaaattcatgtcttccaacccatagatttgcccaactatcagacctcatcagggtacttccttcgtacagtggacagttattgacatagaaattcacaacaggtcaaagcacaaagaataagtatcattggggtgttcagctataactgtgagatctatattactcagggctatctcagaagaggggtaaaagcaatagagctaaaggttgtgaaggattgaagcaaaatagtgtctgaatacaacaggaccaccgctgtcaagaactcagctgtggttgtccaaacaagatctgcaccacatcagtctaaccaggagtgggggtaggattcatgagctctcactctggaagacctgagagaagtcaatggtttctggagtggagtcaatattttcactttttttaagggtggctcttgataaactgaccatgctcctatgggcagccccatacccagaagtctatggacagcacaaattggagtccatgggttattagattaaaaaaaaaataagacacaaagttgaagggtaaggaagttggggaggtggtctgggaggagatagaagagttgggtgaattggatcaacaacattcttaaggaattaataaaataatttttaactaatataagtttagtaccaaccttaacactaagacacttacctgttctgcttccttaggactttatggtataggcactggtcctttcaagaaaaaaaaaaaagttgggagagggactcacagaagtggttccttaccccattccctacttatttccaatatgtaaattcactttttatctcccgcttctcggaaggcttctgggttaactctaagaaccagaaatggtttccatggatggctttcctaaatgcctaagctggagtggagacggtactggggcctcttccctccttccttctatttgaatgtacacagccccagaataacattaacatggtacaaggtctaatgtaaccccacttttataatccatttggtgcctgaggtcaggtgattctgcagctgagtgaagaatgggtaatcaccgtctcaacgactatagaaatgatttctcacctcccagagggaagcacaataactcgggatgtgtgtgaccaagaaattctgttctattatttcttctttctatgatgttctctctgtaagagcactagggagaacaaaagatttctttgatagttgaaaaagttgcccctccctaaagcagatatcattaaggaaaacttttgacccaaatgcttcacttctgctcaacacagcccatgatgatgagaacagacacctacccagggaagatatccacacagtcatctgttactctagagctgccacaatgtttgtgggagaatcctccatgctttctagatatgtggcgcaatctcagatacccgagctctggcccagttagcacattaatgagaaataaagagactacccttcaaatgatcccagggcagtttgcaatgtgaaagcatagcaggtttctaccctccttgagcctgcagaatttgaagagcacaaagagctcacctgggctcttctgtctcctgctagatgattgttttcctttcttactttggtgcttaccactgtcatatcaattgcttttctcttggttttggtccttggatgactatggaatagagtgtcatcacaggtgtctacactctgtagtccaagtgggagccacgccctaccttagctgaggactgctacaaggactatatgagtgggtggggacctatgtaccgctttgcatgtggtggctggggcttgtcaaaattgtcaggctggcttctttcccacagctattttgatcagtgaaaaatgcatgaacagagccatcaccctacctctgtccctataccattgggaccaaggatatttttatgtggccaacctacagtcttagactaaatattttcttttctttgcagtcactaatatgctatttcttctcaagccaagtatagacatttgctggaggaggaatcctgacaaggggcccattttacagttctctctctcccaagcaactgcaatatcagataggatcagaaaaatagccagaatgttttagagtgaaaatatttcctgtggtttactaattctaaccaaaccagaaaagagaggggtgcattttcctagaacaagagcatccaaagctgaagattctgatttttcaggcctttagtctggtgtttcagttggacactggacatcccagatatgcagacatctcagatatccagattgcttagcccactctggagtttctgagtgatcacttctggggtggtgtctgggaatttgtgtttccagtaagtacccagctgaaactgacactggtagtcatataagcttaatctgagcatggtcaatgtagtgaaaaaacaaattttcaagtaaccacactctcatagttttattgtaatcctaaaaccctgacctaggggactagagagatggtttagtaattaataacacttgctgctctcattgaggacctggttcagttaccagcacttccatcaggtggttacatcacaagtgcctgtaactcagttccagggactctgatgccctctggcctctatgggcatcctcaggaatgtcatacacttaaactcatgcaggcaaacacagtatacatacaatatacatacacatatctgtatttatgtctatgtctatatctatctgattggctatcaataaaaacaacaaaaaatgtccacctttaaaattagcttcttctttctaccaggattcaatcaacttatcaaatgaaaaccagcttcctgtcctatccccactactctgaagtcaccattctcatctgtccattgccagtcttcgctccatctcaggtctctgtccgttcatggacagtctgtagttgtccccttgggaaattgtcactgtgtaaaacgtcctgaaaagtggaatctcctttggaataagaaaggccttcttatttatccccttaagagcaatgctgtctttaccaagcaggctgccacaggtgggaaattcacctcacctttctggactgcttccgttccttctttgtctcccacacatgggaaagctgaccccatggacttctttatctagatctccttgatgttttccctatcttgtggctttagtcacttggttgcaacactcagaaactggggtgctgggaaagggcaaggtcttgatactcttttgtgagcttccagcaagctggcctttaaattaatggtggttgagttctccaccaaggctctcaagaagccccttctgagagctacaggtaaggaccattccagatctactgaatctccctccccatgtccctcaaggtctatgtttatcatgctatcactgttgttagcctcctaccccaaaccctccccaatggcgagactaagacctatcagagcaggatgactccgttaggaaaaagcaaacctaggaaccagtcattaaaggctctacattttacaatgtcaacatatgcagaaatcagttgagcaaagcacagaaagtctttacctcatgttgctgggacagctccttagtactttgattctttcaaattcaatggggttcttggagttgtcaaataagcaaggtatttatatataggaggattactaggcagttttccacacccctcatgacctaagtgaaactggcaagcttccagcttagtgaaaagaaaacttcaagagagctgcttctgctttgataataaagacatgcatgatttatgacgctaacaagattttagttagaatctatgctcatgtttggttccatgtacactttgtgtcaggatatagctgatgttttatatgcagtgttagaaaagaagagtagatgcaaggatggatattttcatggaacatgcaggactgttttgttactacaacatacacaaggggaggcatttcagggtccatgctttatgcataacagaatactggagaaagtatctgtggcagaatgagattgcagatgggtggtttttctgtttttatatttttatttatttatgtatttatttatttatttattgagatcttggtctgaaaacagcaaagcccatgtaatttatatcctcctgtggaaatcctaccctggtccacttccacaaccttatcagtggtccaaacaactttctttgaattggccagtagaacaagatctttgtccatttagactatagacacaaccttattagtggtccaaaaaaccagtagaacatgagcttattaagtagtaaggtggatagcaatcagactgtgatgggcaaccagagtttagagtatccaggcaagtgtgaatgttaacatctaattctaaatccacacagttcttttgagttgtcctcatatttcttaaactgttccaccgggtgctgtcagaaccccagttacatttaattttcaatgactaatacttaggagatccatgaaacagaaatgcctctgatctgtaagcccttttcccgaggacagttcctgaaatgctggaggctgttgtttatgggagataacaagtcccatgtttttcactcccctaaacaagtttgtttgacccatctgcaccagatgtacttcatcacatgtgggtgggaggtttataggcaagaaatctgtcaggttgtatctttgcccctgactggatgtagactgtaggtacatctggctatttgcttgcccgggatcagacctgatgggaaatgcaatgaattcctgatggcaagtgtaatgaattatgtgttttccttcttaaacttctgtaaactgtgacttggggccatttcctgagaatttgggtctggacttgactagagcccatctgcctggacagtattgaattaaagcttgcttcaaatttagctttttgtagtactggtcttattctcaatcagtgggatcaacagtcccctggtatgggggtcacaaaaacccacaaagagtgtccatcaaacgcaacttacatgcttattcaaaattttctgagcccaagatggtgcaattattcatccagctggcagggtaagaggaaatgttgaaaagctgtggttctgaaactcccttgtgagttgctcctgaactgtcttgttagtttccatatcttgcttttgtaggcagcagcattgccagataagcaaggacggagagcagtttccagctgtgcattaaaagataaggttattgacttccctaagtctacagtaaactgctgtgcatagatgtgtggatgcttcgtcaacttgggccttcaactagactgtgctctccagactccctgtgaggcaggtatggtcatgaacccaagtttgcatcagttgcagacatcttttcctgaggaccttctcttttctccccagcccgcagataatgagggatataaacgtgttttgctcttgtatgcacacctgactgtactgaagaggcaaagggctgcctggagacactgtagacagggtcattactgaactttgctgctaatttaatatgtcatcttggctctttggcagacatttccaagccagatttactcacttgttaatttgagtagtaatagaattttccttatgggttatggtgagatccagagggatacagtgtcggttgattaaacgcatccaggaatgtgagcattgtttttaccagaggaccagtcttcccagtccagtctgtcctaagtaagcattaggtagaagccctcctcactgcaattgctccccgtcaaaattgagagaagtgcctcgggtggcatccctatgtagatgctaaacttcagttctgagctttaacctgaggcagtgtagacatttcccatcttctggcttgtttaaaagctctagacacagccaagcacagtgtctatagtgcctcctcagtgctggtactcagcctatcccaatattggcagaggcagggtgagaagagattttggaaaaggggggctacttcctctcagctttcttcttctagtcctttatttaaaaggatccatctaaaaaagccaagtgagcgttaaggtgcaaatatttccttaaggtattttcttcaaactagcctttgcccagctttagaaagaagaaatagaaacactagcaaatgctgaaacgaatactcagaatgtggcttaaatggagatcagcgtgactttgaaattttttgtgctacaaattactgcttagtaactgttagggaaacaaaacaagtgtgcatcatgtgggcatcatgtatttggcaatgatccaggatgcagattaagtcttcagactcttgcccagtgtgtctttggcataaagagagtcacaaagcacaccgtggagagagcagtatttggaagaaaaatcaaacagagtgtatgatgagcacatagttgggggggatgctcttaaaagaaaagaacaatgaaaactagagagaggcttacttttgaagactgggaacattatatgcagctctgcctttctccctgccattccatccatccacatatcctgacgcgtctctccttgaagaaaagctctgagtgcttgtgccttcttaggaagtttcatttggtggataacgtgccccaaaataataaatggcagctaagagtgtaggttttctacttaggaaacctattacacaatttcatgcaaatcctttctgttctctacacacatgctctgtgactgcctgacagtcctccctccttaaactgttttgtgaatttgtttcttcttttctttttcaactataaaaacatcactttattttaatgagcccacaaataaaaccactatacagctggtttaaggaagccactcaaacacttgaacacttgtccagtctcaaattctatgcatcccagtgaacttctatacagttgggatggccattatgaagccagggagcttcacttaggattttacacttttactatcagttatgttgttaaatatttgtctcctgcaaaaaaaaaaaaagaaaaaagaaaaataaaagacaggaagaaaaagatttgaaagagttgaaacaaaaacaattagttttataatctctttgaagactcatgtgtctttctgcttgcattctgtctttcctcatcacccattaccccttcttagtctctgtactgttgtttactctcgcgcgcacgcgcgcacacacacacacacacacacacacacacacacatacacattataggttgtgaagaaagcacatctttaaaaacttatctcttttatttttgatattgtgctataactatatcaactctcccttccatttcctttctctaaaccctccttgctctctttcaaattcatagtgtctttattcgataattgtgttacatgcctgtatatatgtatacatacacactttcgaattccatccattttcctataaatttcatgatatcatttttcttttcagctgtacaatattctgtttagtatagttactgccttttcattatccattcatctgtccatggacatctaggttgtttccattgccttgctgttgtgactacagcaccaataacatgggtatgcaaatatctataaagtaggatatggagttctccagtatattcccatagttatatggtacttgtttttagttctttttgatgcatccacaaactgatttctgtaacagttgttttaatttgcattcctaccagtgatgagtaagtgtttctcttccacctcatcctccagcatttgctgtcagatttcttgatgctagcaattctgactcatgtgaggaggtacctcaaagcagtttttacatgcatgttttgatgattaaggacattttacaatcttaaaaatagtgggtttttttcttttggtacttcttcctctgttcatgtcattatcccagttgttcatggggtggttttgctttctaggtattcaatctctgtaattctttgtaaattctgggtattggtcccaggctaaaacataactaggaaaaaaaaattctttcattgtgtggacttcctgtgtgctctgctcatggtttcctcatggtttgctgtgctgaagcttttaaattctgtgaagccccatctgttaatgcttgggactcattcctgtgctagtggagttctgttcagaaagttattgtctaacctaaagtcttaatgagaatctcctgggagtttcagtatttcatgcttaaattaaggtcttagatccattgcaaattaatttttgtgcaagacaaaagaggtggattttttttttgctagaacacaggctatccatatctcacctttggtgaacagcactacaacaaaccaaagagtgaaggtatttctttaaagtttgtgtacttcaaagaagaaactattttgaaattcattagcttagaacaaaatatggaagagaagtgtgtgtactcttaaactagaatgtatattaatcctgcctggacttcctatttcctaatgagagtatgtataatattttattcattattgtgaggtgaaatctccaagtctttgtgctattgtacctgagaagtctaccatgacattctgaacactcaaactgtcagctaaaatgagctcttgtaccttaagctgcctttgtttggtattttatcacagaagtaagaaaagtaacacatcatgtgaactgcttgctcagaaagagtacaagagtcagtatccttggtgttcacaagccctgtcctgctaaatgcaccgggtggtaagccataaatatctctttagagttcatgggaccctcatgtagattgacctttaatggaactgttgcctcagtcactaaaatttctgcattcatcaaatcaattgtcatagacacaagcagttaaattcaatagatgtgctcttagtttataaaatctaaccagctggtattttccttgagggccatcaagacatggtatgtttagttatttcctatacttatacaagttataatgcagattcctcccaagtcttttgaaactcaagtggaagacacaaattccctaagaatctttgctttttgagcttgtacatcatgataaccataccttaagtttagtgaaggtcacacctggcagataatttatctcacattagctggtacttcaaagtgacccaagatgaatccaagtgaccataacacctcaaacacagagataggattaaactaaaatctaaatacacagcacactgttctctgctgcaaataaaaatgggcattctccaaaagagtctaaggtttccagtcacccaaccattcaactgcttagtcactgcctcaactgagccttcacactgagggacatttcaatcacattttctctacaatttggtatctagggcacaaaacaaaccaaggtcttaactggaagagttcattacaaactgtgcaaatcataaagctaaacaactaagagtgcttctcacaagagagaatgagttaaagtaaaaaaaactttcctctttaccacaagacattcataggcaactaatacctaggagtcagggagtcagaatagtatgccaaacagctggaaatttctccatattctaaccacatttatctgttgtggaataatccttctatacattgtgaatatgtattgatctaattggtaataaaaaaaagctgataggccaatagccagacatgaagtataggaaggatagtcagggacagaagaatgctgagaagaagaagggcagagtcaggagagatgccagtaactcaccaagcaaacaagatgtatagaaaataagcaacaagacatgagccacatggccaaacatagaaatatgtgttaatttaaatgtaagagttagatagtaataagtctgagctattgtatgagcattttcaagtcatattaaggctcagtgtgtttatttgaaagtcgttgtaggacagaaatttccacctagatatggcacccaacgtggggcatgaattaacatataaaacctgagaaaggttaaaaagaaaattattctagagacacaaaaatggagtcaaactcggcttcttggtaaccagtttttgactgctgggttctgtttgctggtggcaagcagacacctggctcctttaagaggcagctttctggcttggtgctaaggacaaaaaccactcatctcttttaagatgcccagctaccaaacacttaaatggggtttatgagtaacgagtggcccactacatggtggctgtgtgaacccaacagcttcccagagttgtgatggtaaacaaggctcttgtgctggtacatccttcacgaagaaagtcacaaggtctggacagagccagccaccaaagccgatgctttggtctcttagaagtttgaagactcatgtggtcagaaaaagatagagatgcccagtaaagacagattcaattaaaaaaataacctctaaaaggtttacagtgtgtttgaaaatatgcataggcttgggagagagaaggaaaaaaatagatggtcttagattaaaaaacataattataaagtccttaaaaaagaaatagagtaataaaaaatataaaaacacatgtaaagatgagaactacacagagagactagatcctacatgttgtcttgagactttttgactgctaatgaacaaatgatatctggtaaaagacattggattctgaaaactaacagtttaaactaacctatatatttaaaaactgtcttgatctcaaaatttaaggcaaaagatacgtcactttgggagggaaactatgcttttgtttccacaggaaaggggaggctattaattcattccatgtgaagaaaaatcaggtatgatagaggaagaacccctgaaaaatcactgatgggagcaaatggctcagatgatccaacatcttcgagcacctctgttgtagtttcttctgagttctacatccagaacagcttcaaggcaactagctgagatgatccagcctcacagaatactccagccaggacttgaccataatcctaaattttctcattgtctcccaaagattaccagtttccccaatcaacaggaagtagtctagataactatgacaccattcctcctaaatgagttgccagtgtttattatgattttggggagtaggctggtcacaagttgttactggtaatggtcaggaaaaatgctaagcaagattgaattcaaggatctctttctgaaaagaaaatggagggatatagaaatgataggagaaaagggtagattactgaacatactttaatccaaaaataaacaactattaatcttaaatattttacattggtatggattttagtttattgatgcaaattgaaagttatatctgttatgttgtatgtgtgtttctactcttctttgggctattatgcttaaacagctcatttaaaaatataatgtatagccgggacacaaaagaaaacaactaccaaacattgccaagacaaggtaagacagtccctcaaaatttcctgcttctgaaaaaagtgtgccagatatactaggtctatgggccaaagatggatgccccaaagttacagaaaaactttggatgactgtccagggtgcctgatatccctgtcattaggtatgtttcatccttctgcgtctttgatggagttgaagacttgataggtatagttttccttagttatgataaaaggtaaattaggataaaaaaaactggaatcacaatgatgagaaaaatattaaaatattgtctctaattttgtcaaatacaaatggactggatattctaactataattcttgcttaataactgttctgttatatatagttatactattaaaaaacttcctttttatatagacaaaaagaggaaaatactgtggaataatccttctgtactctgaatgtgtagtattctcattggttatttattattattatttttataataataataattattattattattatttattgtttaataaaaaactgacatgcccatagccagattggaagcacaggcaggacagccagagaaggaaagaatgctatcatgaaaaggggcaggggcaggagacatgccagccagatgaacaagcaggacatggagaaaatgaggtaatgagccaggagccatatggctaaaattacttagaaatatgggttgatttaaatgtaagagttagctataataagtctgagttattggctgagcatttacaggtaatgttaagtctcagtgggagtttttttgggaattgctggtgggagagaaaattccacctctaggcatcacctagccaggtgctgtgtcctgtgactgtgtccaaactgttatcaggaaactgtgtctataatccctgctacctcctctactaaagagaaaccaagaagcagaaattagaaagggaatataggtttatttatttacagtttggccaaatcaggaagagaaagatttcttctttctccactttttccagaagcagagttacaaatttataggcaagaaaaaacagaagcctggacatatgcttgtgtaaatctaactgggaaataaactgtgagaattgtgggaaacctcttcctgtgaggtaagttcctcctctgatgctccaggactgaggctctttaaccttcaaccaataaatttttgcatccattgctttaggttttgattccaatagtattgtaaccaaaaaggcaacttagtggcctttttatgtgtctcctccctggccagggcattactatagaatacagaagcagatttttctaaagtgctggttctgtcttctgcctaaacattcaacttgactttcactgtaagtattaaggttagtgtgtttgggatggagagggagttcagtgattaagagccctcctgctttttcagagaacctgactcagttcccaacacccataagacaactcacaaccacctgtaactctggtttcaaaggatcccctcttcttgcctccatagacccccccccatgcctgcagtacacatcaacttatgcaggcacacacatacacacatcaaataggagaataaaaaataatatatttaaagtttgcatgtttataagacatttgtactggtagtcccaattgacaatggactagatttatgaatcatctcctgaaaaaattcaataggaggagtgttgtgaaatattattgaagatgtgttacatttctttatgttgtggagtatttgtttaataatgcaaagctgtgttgcatttattttttatgtcacatcaattgaactctgtgaagctgttttgctttgcctgtctaaaacatctgattagtcccataaagagctgaatggtcaattgctaggctggagagaaggataggtggggttgccagcccgagagaattaatagaagagagaagagggaggagcaacaacaaaaaaggagaaggaaatgaagacgccaggggccagctgtgcagccacacagccaaccgaggagtaagaaggaaagaaggaaatacagaattgagaaaagtaaaagcccaagggcaaaaggcagatgggataatttaagaaaagttggctacagcagggtggtaggggtacacgcctttaatcccaacactcaggaggcagaggcaggaggatctctgtcggttccagaccaaactagtgtagagagagaatgccagaacaggctccaaaactacacagagaaacccttgtctcaagaaaccaaccaaacaaataaacaaaaacaaagaaaagaaaagctgactacaaaaaagccaagctaaggctgggaattaataagtaagaataagtctccatatagtttatttgggatctgggttgcagacccctaaaagggcaaacaggaaaaaaaaaaaaaacccacaactccagggtacctagacacaaagaaagggaacaatagggccatctccagtcagttgctttccaggcagtgtgtggaacaaacaaatttctgtgtcagtgtcctttgaattaaacagcctgacaagtgatcaacaatatttaatagattcgaattcttagggtttctattcctgtaacgagacacaattgccatgacaactcttataaaggaaaacatataattgggaatggattacagttcagaagcttagtaaattattgccatggcaagacatgtttctctgctcaagccagtccctgtggtcatttgaataaaaatggccccaggaggcccatcaggtggggcactattaggaggtgtggccttgttggaggaagtgagtcactaggggcaggctttgaggtcccaatgctcaaccagggcagtgtgtcattctcttcctgctgcctgctatctgatgtagaactctcagccctcctccagcaccatgtctgtctcaatgctgtcatgcttcctgccatcacaataatgggcccaagacaaagaagtttgtttcagtcaacaaagatgaaaggaattgggaatctgaacaacactttgacctcagacggggagatgcagagtttggagtttgcccagctggtttttgctcttgctttggatccgtattttctctctatgctcccttccctccattttggaatgataatgcatatcttgtacactgtgtgttggaagtatgtgatctgctttttcatttgattttacagggtattacacgtgagacattacctgagtctcacaagtgactttgaaatagatagactatggggacttttgaagttgcactgaatgcaattttgcattaggatctggctacaaggctatgggggcctgggagtctaatgcagtggtttgaataacaatagcccccatagggagtgccactattaggtggtgtgcctttgttggagtaggtgtggccttattggaggaagtatgtcactgtggaggcaggttttactctctcatatgctgaagacacaccaaatgtgggattcaggtctcttctgctgcctacagatcaagttatagaattctcagctcctcctgcatgtttgcctttacattgccttgatgataacgggctaaaccactaaaactgtaagccagcattttccttcataagaattgctgtggtcatggtgtctcttcacaacaataaaagccctaaataaaacaggcacttaacaagacaaagggaagcaaattccatgtgatccaattggactagaaggtgacacctgcagaggttcattaggataaccacaccaggcatgctgggatgaaccacttcctgactgcaggggacctgacctgcagatggactcttccatcaccaaacttccccattaccatcttagcaactcctaaaacaacagagcctcatgagtagagtctccgttccaaggagagagtgcacaacttcagtcctttagactgaggaacaattgtgttgtgaagatgccagactggtttctttatatccacatcacctccatcaatcccagtctaacagcatcttctggtgccagggttgtctctttctggacagctgaatggaactgacatgtcagtctgttacagaggcttctcaccatcaggtcagagtagagggcagggggaccaatccctgttacttctcagtttttctgatgagaagccagcaaggttcattttcactttccagtttcagcttcctactggtgacatcaagaacacatcacagctcacagagctgtttcccagccctgtctgagagttcaggtggtgagaaagaccacaagacagcagagagtcaaggcgtgattctgaggagccctatcctggtgtaaacccagacagcagctgacaccttaacaacaaccatgtggtaaggatttccctgctctgcagtttgagtgaaccgaagagacgggcatttgtgtgtgtccaggtctgattctttctgcttatattcgtttgttctgtcctgtggcttctctttctgccgatgaaaagggaataatgattgtcctgatggtcaagagtttttgtttagtggcagtaacgtgtgcaccaagctggatgggagaaagggagcttgctttagtttttaagtctgtttcacatgtgtagttcaaaatatctagggagactttagcatgttcatctcacacaaagagagaattatcaatgagacctacaggattggacaaggcaccactctacccacctctgtagttcaaaatgagaagtccaggctaatagtgtcctcctgtccatctcctgacacccagtccctcattgccctgggatgtactcaccagacctcaagacctcttgagatgctattcaaggtttctgtgacaggtgatttctacccatcccatgctgggttaaccaatggacaggacatatttttttctgtcccccaatgggagacaacaaagtggaaattctgctacatttgatgagagacatttaaggctttccaaagaaactaaaaatacccagatatatatgcatgtatgtatatatattatatatatatgtatgtatgtatgtatatttaaacacacacatatacacatataacagagagatatactaacatagttgggtgcattatttatgtaaatgtctctgacttgtatgtttgaaattccccttcatgtttaaagtgtcagccagtagaggtgttttcccttgcatgtagtgctacactgattgtctccacactttggcaactatttatatgtccttgaatataaaatcattcatagtaaatgagtatggaggaggatgagagctgctgttgtataatgagacagaagacagagatcacaatggtaaaaaaaaacaaacaaacaaaacaaaataaaaaaaaaaaaactgtggagccaagttaaccagacagcagaaggcagtaagacttgtcaggtgacagtcatggtcattgaggcagtgaccaagctgtgcctgggtctccagttcccatcactccagcaggtggctaggactgtggtgtgcaaatgagtgcttacagtgtgagaaaggctggagctctccaagtacatgggggatcctgagtaactaggtggacagtgtggacctggctgctctctgtcaccagtacctacacagatggctgtgcctctgtgctgctcagctttcctgctgcaagagctcatgcacaagggctgtgcctccaccttgggcacagatctccagaaggatcctggtgagcctgatgagcttggtgagcccagtaaaggttcatcttcctgggcagctgatgtccattgtttaggtgctctgagtttcccccaaatggctttatttcccaaaggaggtggacataatctctaattctagctgtggtctgctgtttgcagggaaagcaaagaaaggcaggattgaatctgatgtccctgggccatgatgattcttcctacagaactctgtccatcatttctaagttctctggaagagaaggattacccatgcatttggtgctttcagagagagacagagagaatcagggaaggacatatttccggggtctctgcacattccatggcagcagattaatggtctgcataaagcaagaagaaaacttagttagccagtgttgttcagactcctagattctaaccccaagcagtgtgttttaagtatatttaagtacagtacaatttggaacaaaaagttccctggtgtaataaaactccattgtgcacaagaaggcataattacattgaatctcaactccaagtacatttcactgcttccatgaagatgggttgtagggataggcttcaggtattattcaggaaaggatgtggtgtggtgtcagccataccaatagcatagatgtcatttggggtatttgccacatccctccctgatttagggaggttgggagagggtctgaccattcagataaggtaaaggccacctagactattggtcagctctgggcctgctgtgggagcttaatataataacaatctccatgttattagtgacccctattccaaagtttctgggtggaaacacaagccatacatttttcctatggaagagactctcctgagagtttatcatctctggtttgcttagtgcttatatgtgagggaaagaatctttttgctctgaactgacagagatgggaagagaatgggaaaatacagagacagatagggagagatggagagacagacagacagacagacagacagacagacaatgtggaggccccctggaagtctgcttttcttctcttatctaagtatcacagtatccttggggagctactggctgcctcatggctaggtgctatttcctcattttccctcctgccaataaggcctatttacaaatatgcagattatctgcatattgccaggggcttaagagcctgaactttaatctgagttacttcctagggtgctgctgatggtatatgagtcaactcccctctaaataaaattggcattcttctttcaagaatgactggctgtcttgtctttattaaatccgcagatcccttgctggaaccggtaaggagttgtaaggatggacactacatagtggaggtcctcaccaagatggagaaagaagggaatgcacactgatggatcaccggtggaattactggctaacttcaaggtaggaacgggtgtattgatatggctgcctcaactcctgagagacttaggctggtaaggtactgtaagggtgcctcaggtcccaaaggagctggattgaaaatagagtatgctgtcttaaaaagaaataaaaaaaagaaaagaaaaatatagaaaaaaacagaaataaaaacatatataaaagtagaaaaatgagaaaaatcgagcattagtgtaagatcactggaagctcaggcctccagaatcttttcccaggactgcagccaccccaatcaccatgaggaggccgaaagttgatgcaaacagcaagaggctttaatgaaaggtagacttgtataaacaggctctctcagcatgcaggctacagagcagccctggccttcactatggggaagggatctcttgagagacatgggcttcaaattgagcaatgaatattcccctacttctcaaaaactgatgaaggacatgggataccatccagattatggattaggtaaatatttacaagggagaaaggagccagtgcaaacacgacaaagaaatcccaggcaaggtttgggtttttcctaggggccgctgaggagtgaattctcattacctggaagacagaggaaccggtatgggttcctcagtggccactgtcctctgaaaaactgagcgcagcaaaggtccttgtggctgaacagctggcgttgggacacattaaaccatcagtgtctccgtggaacacccccatcttcgtgattaagaaaagatcgggaaaatggcgcctactgcatgacctaagggcaatcaataatcaaatgcaggtaatgggcccagtacaatgagggctgcctttgctgtctgccttgccagcatcctggcatatcattgtgattgacataaaagattgcttcttttctatccccctttatggcaaggatagtgaaagattcactttcaccatcccatctcaaaatcatgaagagcccgatcaaagatttgaatgggtggtgttgccacaaggaatggccaatagccccaccatgtgtcaactttatgttggggaggctattggaccactgagaaaagaattccctgctctaaaatgtcttcattatatggatgatgtgttattggctgctaaagaagagatgatgttagacaaggcttatgtaaagttagttaagctgcttgaaagaaaggggctgtttattgccccccaaaaggtgcagaaagagagaatggtcacctacttggtagcaaagattgatgggaacggtattatcccacaaatgatggaattgagtaaagataatttgaaaactttaaatgattttcagaaactgttaggagatataaactgggttagatgttatttgaagttaccaaattatgagttgaaacctttatatagtgtgttaaatggggactcagctttagattcccctcaacagttaactcctgaagcagggggtgccttacaaaaggtggaggaaggactacaaggtgctttcctacaaagatgtagagaaggccatgccatcacactatgcatccttcctacatactagcaacctacaggcttgctttggcaagagggcccgctgctatggatctaccctaagatatctcctgctaaatccactgagcattatccccctgcagtggcaaggttagccttaaatgggatccagcattgcttacaattttttggcatggcccctaatatgattgtggtgccttactccagtcatcaagttaaggttctttgctccacggttgacgattgggccatcctgcaatgtggatttaatggaagtatagataaccattatcccagacatccattattaggttttttcagggaacaccccgtgatattcccaaggatgacatcacctcagccggttgggggagccccaaatgtgtttcctgatggttctaagactggctgtggggcctacatgatatcgggacgagagcccgtgctacatcaattccagcctggcccccccagattgtagaattgaagatagtaatagaggtttttaaggcatattccttcgcttttaacttgatttctgattcagcctatgttgttaatgctgttaacatcctgaaagtggcaggacccataaaaggtaccagtccagtttgacttttgtttaagcaacttcaacacttaatttggcaaagaattgcttttctgtccaacatatcagagcccatacaggtctgccaggaccactgagtgagggtaatgacagggttgatcagtggaccagaatggattacatatttttaagttccaccttggaaaaggcaagagattttcataagacttaacatgtaaatgccagggctctgcaacggaagtttcatctttctcgagcagatgctcgacaagtttttctaaattgtcctcagtgcatagtgcatcaccatccacccagcctaggggtcaaccctagaggcttgatccccctaaaaatttggcaaatggatgtcactcatgtttcagagtttggaagtcttaagtatgttcatgtttctgttgatacctgctcaggcattatacatgccacgcccttatcccgggaaaaggcaagcaatgttatcgcccactgactggaagcatgggcagcgtggggcaagccacaacagctgaagaccgataatgggccggcttacacagctcagagcttcacttccttctgccagcagatggaaatccaacttaaccatggtctgccttataaccctcaggggcaaggcattgtggaatgtgcgcatcacactctgaaagattgtttatcaaaacaaaaagggggaattggccacggccgcaccccaagggaaagaatatcccttgccttatttactatcaattttttaaatttggatgcccaaggccattctgcggctgatagacatcaggacccacatggcccttctaaagggatggtaaaatggaaggatattctgacaggcctctggcgtgggcctgatcccgtgctcacatgggcacgaggttctgtttgtgtctttccacaggatcagcaggatccagtctgggttccagagcgtctggtcagaaaagtccagcatgaagagtgtccagaatgccagcatggtgacccttctgctcctcctcttgatgagccggctggggggaacggagccgagatggggcatcctctcagtgtttccaaaaccgataccggtgaagtatagtgctcaattttttccccgcttttttgctagtaacagaagttttggtttgccctttttgcatttggatagacagttgagccccatagaaggaaataggacgttttggctaaagggcagcctgtgttttgtgttgattagaaatattagtgaagagtctccctgcgtgcagctgtataatcaatctgcggcctggtttgaaactccttggacactggacggggcttctgtaaatgcctcttggatatctgggtggtagcttagtagagcaggagaaggatctcctcctttgcaacctatgtgggctcccttttgtagtggggatattgaaggagatggcaggttcccctggacaggctgccagagtagagagattgtctgggccgtgaaaaattatttttccttttcccccgctatgagtactgaatttaatagatcttcttcaggagggaattttactaatcaggacctggggtacttctatgaggttaatccctttgatttatggctgttatgtgggataaattgtagctgcacagatctagcccctttttccatgattgggggaggtgcccagggagtagggcgatttaactggaccctccatagatggtttggagactttttcaatcctcggcctgttgcaagaatagtcacacagcctggcacgactacaccctcttatatggttttgggagctggagaggaaccaagtacctttgagaatttgtatagtgccaaatattcccctacccctgtgtgtgtgtggcctccgtttgtgtggatagtcagtaatggctctatggaaggggataggttgaattgctcaccgacaacctgtttttatgccctttgctggaatgctagtgtgtttcagctggctgtggttgctcgcctgcccagtatgtgcctattccggtggaggctcccagcagcatgacactgcttagacccaatagagattttggcatcactgctgccattgcggttgccatcactgccgcggccgtcggggccacagtgtccgcagtcgccttgtctggcacggtacagacggcttctgctctgaaaaacttgtcagctaatgtggcacatgccctggacttgcaaacatctcttaattctcaaataaaaggagggctaatgattgttaaccagcgcattgatttggttcaagagcagttggataccttatggaagctagcacaattaggttgtgaatggaaaatgccaggactgtgtgtcacatctgtccaatatactaattatactcgagctggcgagcaggcaaggtccctgtctgcttatcttttccagaactggtccctggaatttgaagacattttgaaagaattgaggttggctgtggtgaacgtgaattctacctgggttgattgctcccttgccacgggactgccatcgtggctggactccgccatggaccatctaaaagaatgggcgggcttgggggcactgacaggcctcttgatcttggtctccctgatttgcctgtggtgcatatataagatcagagtcacacagaaacgggatgcagccatgattgctcaagcctttatagccattgaagctggacagtctccccaggtctggttgaccgctattaaaagttaaaatgatatttctcccaaccggggtgcaaggcagagcactgcacggggatctgcttgtgtgcagttaagcaatccccggggagcatgtctgattgcaggaaggttgtaccccaaatccttcccctggaaaaaggggtaccggacgggccagggtcacaatgggcagagagcccgtggttgattccagtgcaatgttccatgatttgcataccagggatcagacctcttctctcacccgtgttgtttttaaaaataaataagggggaactgtggagagctgcgctttgtcggcccaaaagatggcaccggcttctgcctcccaccatcccgagggtgagaggtctttgtcctggacaatttcttatctggctaaggctgggcttcaggcctgcttccgtgtatgtggacccttctgctttcgccacatggcagtctggggtgggctaccaagggcattttaagcagaggcgtcaatctgagacttaatgaatctggttagtttttgaaaaggtaaaggtgaaagtataagtagtcaatccagtagaacaggcaaggtagcaattaaatgcctgcaattccctcagaaaagggaggggtggaagaatagcggaaggtcaggggaggagggaggtcctggggggaaaaatggtcaggggttccctagtctggagcggcccctaaggctaaagcacgtaagtcaactatcaggggggaataggagggggtggtcgcaatagttggtggaggcgttggcagcatctctggctcggttgaggatcatccaggtgtagttgtagatgtgataagggtttgtagaggcaacggcaatcgaaggtgcgaacacacaagtagccaaaaagacagcatcttttatctagaattaagcagaattagaaggcttctcaggggcttcccctgggtggattatatagttttaaaaggcattcaggcaaccatctagcattattggcctgagtatcaaaaatacatgcatgtccttttccccaaatgaggactggatctggcctgtgccatttgtgagttaggggatctttccataaggcttgagcataattttgagtggttgatggttgatggatgccagaggcaatccgaggctgattttcctgcagcatcatatgtgagaaaatttagtacaaacaatgtataattgagtaggttctttgattgcctttagtggggtataaaattcctcctcccaaatatagtttaaatgtttttaagtgtttggtgagctctttcaacaatcccctggccctcggggttgtagggaataccagtaatgtgactgatatttgaatgagaacaaaattgcttgaaggctagactgttatatccagggccgttatctgttttaatagtcttgggttggggtagggccgttaggcaggaaagaaatgatttatgacatttttggtggcctcgcccacctggagcgtggcataaatgaaaccactgtaagagtcaatagtcacatgtatatattttaatttcccaaactgggagaagtgggtgacatccatttgccaaagttgtccagggagcagaccttggggattaaccccaaggtggggctccagcaggagagtaaaacagcctttgcaagagcagactctctctctagcttgttctctggtaatgccaaactgaaggcgtaggctatgggcattgggatgatgggtggcatgggcttgttgggctaagaatatggggtcagaaagaggggggcccgtttgagccaaggtaattatttgggtagcttgatcaacggcatcatttgcccaagaatggggcccaggcaacccggaatgtgctcgaatgtgaccaataaagaaaggggagggtcgggttaaaatcaggcgctggagagttgaaaagaatggagccgcacctgtagatgggtggatatagggaacggtctcaagacagggaacagaaagggcaagataagcactatcagtgtaaagattaaagggtacatcagggagagtttggaagactttaattatagccaaaagttctactatctgggcagaggaggctgatgtatgaaaataaaagattttgccatctatagaataggcagccctcccggtagatgacccatcagtgaaaaccagtgtggcatcattaaggggagtccttttgttacttttggaaagattacgggggttttttaaaagaattggacaagtctattggcggggaaatgattatcaataaggccttggaaagatataagattaattgcccaagtatcttcattttgggtgagccattgtacctgggaaggggtataagggagcacaagaatgtcagggtctttgccaaataatttaatactatgctctctgcccatcctaatgagttgagaaattagacaggggtaggtaaggaggactcagccaggtgaagcagatagatggaaccaatagaggggatcattctgcaaaaaaaggcctgtgggcgtaaatggcgtggggaaaataaggaagctcaagggtttgtcgggggaaaaataagaaacatgttgttggttgatggctgtctccaccagggccaaggcctgggtggcttcaggggtgagggttcggggagacaaagggttagaatcctcttttagaacatcaagaagaggtttgagttctcctgtggtgatttttagatgggacaaagccaattaatgtcaccaagtaaccgctgaaagtcattaagagtagtaagggaatcttttctgatttgaaccttttgggacataattttatttgggaagagttcataacctaaaaagaattgaggggggtgagtctgaatcttttcgggggatatctgtaagtcttgggtttgtaaggctttaacaagttgttgggtgacaaggctcaaattgttttcatcaggtccggccagaaggatgtcatccatataatgaatgacatacagataaggatattggacccgaaagggaactataatctgggcgacatacttatgacagagggtgggactgtttgccataccttgagagagaactctccattggaagcagggcatagggcctatatgattagtaataggaatactgaaggcaaagcgtttgcagtcatcagggtgaaggggaatggaaaagagacaatctttgagataaatgacaattttagaatattgtttagggatggctaccggagagggaatgccgggttgtaaggctcccatgggcatcatagttttattaatggcacggaggtcttgtaataagcgccatttgcctgatttcttttggatgacaaagatgggcatattccatggggaaatagagggttcaatatgtcccgcagttagttgttcctgcactaactttaaaactgcagatagtttttgggaggtaaggggccactggtcgatccagacagggctatcatttttccaggtgattttatcagcctggagtgcagttggagcaatggccctcaggaaaaattttgaaatctgattccatggcaatcattttttttttatgtaaagcgaggggggtagttataccctgaccatgtttaccaaggccttgacccagtaggaaaccctgagagagcatttgttgggtaattatttcattggggctgtacataacaacctgcatctgggagaggatatcccttccccaaaggttaaatggcaggttggggacaatgaaaggttgaaccgtacctgagttgccttcaaggtctcgccacattagaagtttagagctctgaagagggttgtttgattgtcctatacactgtaaatgtgttacggagggctgagttggccatgttgaaggccagaattttgatgagatgactgtggtgtcagcccctgaatctaagatgccctgaaaccatttattttcaatctggaggctaagcatgggacggtccttggaaatggtccggacccaataggtatcagaagaaccagtggaagaagcaccgcgctcttggttgttaatagagggtgctcaggtatctaaggggagagggatagcttgggcgattctctgtcctgatgttatagaaatggggccagagcgggagctggccagtaattttatttctcctgagtaatcattatctattacagaggggtagatagtaaggccctggagggtagaggaggctcgaccaagaatgaggaaacaagtatctgggggtggtgggccagaaatgcctgtggagagaatctgtacaccatcctcagggtttaatattgagtccggtggcggcacacaggtccagttctgcgcttccaggggtggctctgtagagcttggaggtgcaggttggaaggattgtgcctgcaggcttggccccatgctggcaagaaggggattggctgtggggcccggggctggcccctcaagccatttccctgaggaggaggcaggggattccctcgtacatcagttttggatctacagtccctgagccagtgtttccttttttgcatctgggacagacagtttttggcaggggtgaaggggcaggggtcaggattccctcttgggatcgatgtgtcggggcgccctctgaaggtcggggtgtcatgtttttgggaacattgtttagcaaaatgtccagtttggtggcatttaaagcaacctctgttgttgcctgttgtttgtagagctgcgccaatagccatagtgaccccttgggaaatgctatttgagagtttatgagaaaaggggtcaacatcattgcatgcccaaatgatttcctcaagggacttgtttttaaaggtgcctctgaggatattgcggcagacgctgttagcgttctcgaaagctagttgtttaaggagtctgttgtcagtttcttctgtgcctaaaacccgttccgaggcctctgtaagcctccctacaaattctgtataaggttcattagctccctgaatgatcttggtgaggggtgtaaacatggcccctctgcctgggagagcccgccaagcaccaggagcagcctgagaggtttgtcctaagagacctatgggaagcttaatctggagattctcagagagaaattttccttggctggtgagttatcaagggtccatttttgggtggagggcctttgttggtttttggtagctaggtctcagcaacagtcataaaattcagatttccaagaaaagtattgcccgaggctaaggactgcctgtgcaacacggtgccattctgccattcagctagggtgaggtatccctctcctgagagggcctctagcaaggcaagggtgaaggatgcagtgggaccgtaatttttgaccgctgaattaagttccttaagggctttaaattttaattttttaaaggtttttttggttatttctgtttgtttaccttggtcctcattatctgactcagagtcaatcctatccctctcataaattttatcctctgagttttccacctcgtcctcctctctagttgtatgaatagaggaggggtcttggtcagaggaggatagtgcgtatctggggccctggcgagttaggacaggaaaggccagcttagtggatttggagatttttggcctggagcttggtggaagggaggttttaggggctgtaatgggctgagtggggaatccgaagattgatcggccaactgtggtctggagggatgtgatgtctagggagagttgtgacaaatcctgctgtaattgtaagttctgatatctgttgggtgagatgtttttttgcttgaattaaggcctctgtggaagatgggagaaggggagccaaggcatagggtggaggtcctgtaggggcagtaaagcccgcgaagggaggccagttgggtttgtaataatcagctgtcccttcttttagatcctcctcgtctgagtgacttaggtggtcagtttctggtttgggtttgaactaaaagtagggtaatttttaagatttttaggggaatgaggctcgaggccctgtaaagagggataaagattatgggagggttttaacggaggtttgtctgaaagatgtgacagggggttttgggtctcttcatggggcatagggatggaaatcggaggacagggagaagatggagttttgtctatggggcagtaggaaacaggagaatgagcgagagagaggggcttgagaaagtttttaattgcagaagtaaggtgagcagagccaggggagttagtaaagatatcattgataagattccaataactaaaaatctgtgacggaattgcctcaggtccctttttttgagtaatctattaagatccagtctgatttttttcccaagttaggggatgaataactgggctttctacaatgacccatggacatgtttttgacaagaaggcaaaaaactgaatcaagtccttacattttactcaaactcctctttcccgaaaagaagtcttaaaatccctaatgaatttgacttccttagacaatttttggcccatattatcaacggaataaagggggaacttaccagggaatcagtcactcatgagcggtgagaacttttcccagaccagcgtccgtcgcaattgggctagcagaattccttgttggtgtgcactacccaggtttccttgcgggggggggggggtctccattcgacaaagaatccataccttgagccgaacgtttggtgccacctgcccccatccaaggggctccggtaatttgtgagtccaaggtggatcagcctgaaaataatgggcaggaaacaaagaatgggaccaagcaggttttcttgtcaaggcccatttattgattattccaaggagttgttatagagaaaggaagaagcagagaaaaaggaggtgggggaggaatgaatgttaattgctctcaggcaggtatccggaatctcctgtgtggaggaaggaataggtcttagttgcttctcaggccaggtcctggaacctgaggggtgggatgctagactagctggcagctagctaggcatggggagttgccaaggctggcttctgacagaggaatagtagtgaggcgtgtgtaagggttaggaaccacaggatggagtggcaccactgcagagttaatgagccggaggtcctgaaccagatgataagtcccattaggtttttttgaactgccagtatagggtgttaaagggggaggaggtaggaagaaacaactttttccttagtaggtcagagataataggtttaagtcccttaaggctctggagtgggagtgggtactggacttgagcattgtacctcgaggggtcctgtaactgaatgacaatggggggatggtgtctagccacagaagggttctgggtgtcccagaccttggggtctgcctgagaggctggtaaaggaaatgacatactggaacctgcctgcagggtgagtagctaggaggaggaggaggggaacccctggcgagtctgaagtcaggcaaatgtgggttgcaaaagaaatagaagctcctaccttagctaaaagatccctccctagtaaaggcaccggacaagttggtataaccaaaatgaatgagtgaagggaatccccctaaaaatacagctcagtggtggagtctgctgaggtaagaggtgggtccccaaaactcctttagcactgagtatgtggcgctggtctccaaaaggaaggacatggaccaccctgatactttaatgtctacccggggctccctttcagagacaacggtatttgggttaggagagtcagggccctatcattcatcatcctcgtccatagccagggctaggaagtcagctggagggcagtctgtgtttgatgtcctcttgtcatgtggaacatggggacaatccactgaccaatgaccctggcatcttggaaatggcttgcatggcacatagggatttggacaaccccaggcccagtgcccggttgttgcccctagagataacggagctgtcagtctggtgtgaccgacagtgaataattcctatagctttggggaggtgagaggccttccacatggccataatataacctgagttagttatggatcctcctcttgtagtaagtagcccacgttccttccaaatagctgcgtgggacaggaggatatgaaaagcttagagtctgtcaacatttagaaaatgtccctgtgccaattggaaggcacaagtgagggctattaattcagcctgttggttagtagtgtgggcaggaagtgcccgtgcttccaccaccctgatgtctgacactatgccatagcctgctttaccggtcccctcatgtaaaaaagagctgccatctgtgtaccaggtataggtggcctgaggtagtgtgccctcctgtatgtgtgaaggatgtagcaatagttcctccaaggtttcaatgcaggaatgagctggagaatattaagcattaggttggggtagaagatttgagattttaaggggtgggcaagattggaaagtaagcatggcatcttctactaatgccacctggagggaaagaacttgggaaggaggtagagtttgtaagcctctatatgttaggagatggggcaggttgtgatgagagaagacagtgatgggtgtcccaaaggttagtttctttgactcacggataagaagctcagcagctgctaaagcatgtatgcaggatgcccatccttgagtagtcaggtctagcttcttcgacagatgctacaggtgcttcttcgatagatatgctacaggtgcaaaggaagatcctagctggtgacctagaactccaagggcaaatccttctttttctgttacatagagggagaaaggatgagttaagtctggtagataaagagcaggagcttttaggagagcctgtttaagtctctgaaagggcttagtaacagggttaaggaggggttcatgtggaggtccgagagccgcctcatacagggggcgggcaaggagggaataagaggggatccatgtacgtaagaagccagcatttccaaaaaagataaaatctcctctttagtagaaggaactgcaagagacccgattaagattttcctgtctacagtaatagctttgtgggttggggtaatggttagtcccaaataggtgacctgaggagtagacaattgaaccttagaaggtgagactctttaacccctgctagacaggaaatttaggagggtggaagtgtcagtccggctaacttccaaggaggggctacaaagtaaaatatcatctacatactgtatgaacttggatttagggaaagacagagagagcaggtcagaagccagggcctgaccaaaaaggtgtgggctgtcccggaagccctgaggtaggacagtccaggtgagctgagtggagacatgagtatctggatcagtccaggtgaaagcaaagatattttgagaccgggtgtggaggggtatagagaaaaaggcatccttaaggtctaaaactgagaagtgagatgtcccttgggggatagtagagaggaatgtgtaagggttaggaaccacaggatggaggggcactaccgcagagttaatgagccggaggtcatgaaccagacgaaaagtcccattaggttttttactgccagtataggggtgttaaagggggaggaggtaggacgaagtagctttttccttaggaggtcagagataataggtttaagtcccttaaggctctggagtgggagtgggtactgaacttgagcaacgtacttagaggggtcctataactgaatgacaatggggggatggtgtctagccacagaagggttctgggtgtcccagaccttggggtctgcctgagaggctggtaaaggaaatgacgcactggaacccgtagggtgagtagctagaaggaggaggaggggagcccactggcgagtctggagttaggcgaatgtggggagcaaaggaaatagaagctcctactttagctagaaggtctctccctagtaaaggtacccgacaagtcggtataaccaaaaacgaatgagtaaggggaatccccctaaaaatacagctaagcggtggagtctgctgaggtaagtaaggctgtcctcctaccctgacaataggaagacgagaaggagagttaggtccccaaaactcctttaggactgagtatgtggcaccggtgtccaaaaggaaagagatagactgccctgatactttaatgtccacccggggctccctttcagagatgatggtggtcgggtcaagagagcctgggcctcatcattcatagtcctcatctatagccagggctaagagatcaactggaaagccgcctgtgtttgatgtcctcttgtcacctgggacacggggacagtccactgaccaatggcctacttcctggcatctaggacatggctttcgtggtgcacgggggttcgggcaaccccgggcccagtgccctttctgaccacacttgaagcatggacgctgcggtactctggccccggagggcaagggatcccgggcagatgctgaggctggtcggacggcttcagctagcatctggtatgtgttcttaagggtctggccatctctcccatggtacaccttaaacaccactcttagggcctcatcctgtggagtcaggggtcctttctccaaatttttaagtttagccctaatgtcggggcagctctgagcgaaaaagtatgtcatgagaagttttcttccctctagcgtctcagggtctaagttagtatactgtaaaaaggcctgtttaagacgctgtaggaattgggaaggattctctgatttgtcctgaactatatatatctaggagcttatcataatttatgggctttagggcagccttacggagaccagacatgaggcaagttacaaactgatctctagccaggataccacccggggtgttataatcccagtggggttccttctccgggacagcgtcattcccagtagggtgagttggctgagtctgatgtatctcatctgcacatgccctcgcataattccaaactcgctcgcgctcctcatgtagtaagttattacttaaaatcatgaagacatcatgaaaagtaaggctataagactgtgcaatgtactgaaattcctttataaaggcagtggggttagaggtataagatcccaatctgtgctgaatctgagagagctctgatagtgggaagggaacgtgaactctaaccacgccgtccacaccagctacctcatgcaaggggaggatagtggccggatctgctttggtagatctagatcccattcgggaacaggtagtaggtggggtgaaggtgggagccaggggtgggtgtttgggagcagctgagtcagaggaagctggagcggggacggttgagacagaagagagaaggttcaaggatcttagcagaagctttagaaggctcagttggagggtgaaggcaaaccggtggaggttcatcagctggatccaagtctataagatttaattcaggcttagattccatagccagaagaattggggatgaggagggagagagagagtgtttagcagatagatagaaaaaagcctgtacataaggtaactccttccattttccggtttgctgacagaagttagataaatcccgcaaaacctcggggtctaatgtcccgtttgggggccagtgagactggttctctaaggaatacctaggccattttttagtactgagatatgtgagtctagatgccttaatgaacggcattaggtttaagggttttaagttctctaaaagacatcccagcggtgtggatgggattatttccttagttggcttattccccatgggtgaataagttaaaaaccggtaaaagcccctctccggatgctcgtcagcccggggggggggtatcaaggcgccttagcccgatagaccctgggtctgaatagggactcagctgtcctgaagaacaaaaagaaaacagaagatcccacagtcccgcagtgcagcgactaatcgccaagggagcaagtagctactgatgggaccacccttaggaaataagccaagagggattgtcggcgaaaggggtcgaccataaccgtgaagggagtggtcgggtggtcccccacctccaagaacaccagaggggtgccggaagatcaacggtcagtccctcgggttcagggagatgtttacgctgactgaaaggggtagccttaccgaatttggtccggtgttgtatgcagagtcccagcaaaccggtgagatggaacgtggattgtctatccgtgtgttaagggtaccgtggacctaacacgcgctcaccagcgggtctcgggagaaggtataagggcagagcctttccacgtccagttgccaaaatgttattcttttgtttaagctgcagctgctgatataaagaaaggaacaacagatgaacaacccacgtggagtttatttaccagaaagggggggtgaaggggatgggtagtcagccaacccaagaggagccaaaagaagagagctagggatgggtggctggaacttttaaagggaatgttgcatatgcacactggggttttgcacctcacagtttttaatgcacggcagatgagtgccccgctgttagggggcggggtcagggtcatcaggtgtattgttcttacagccttggcttttcacaatttatctgctatcattatggaaagagcagaaaactttgagcagtccaaacactgcatgcaactcatagcatagtcacagatgtgaacaaggctgtctgtctgcgggtgcacatgttgacacagaagcaagagcccttgtcacttgttcagagccaagactacagtgatatcctgaaaaataacatgggcaattactgccagaaacacacccacattgttacacggttgattttggattcacttttggtcactgcacattcaggagcctagctctctctctctctcttctctctcatctctctctctctctctgtctctctctctctctctctctctctctcttaacttgataaaagtttagttttcattttacataccaaccccagttacccctccccccaccttctctggtggccctgcttcccaaccctaatccaatcctcctaggaggtaaggccatccttggagagtcaacaaaatcaggcataccaagttgaggaaggaccaagcccctcccccctgtatcaaggtttcccaccatagataatgtgctcagggtggcaacaccacccattcaaatctttgatcgggctcttcatgattttgagatggaatggtgaaagcgaatctttcactatccttgccataaagggggatagaaaagaagcaatcttttatgtcaatcacaatgatatgccaggatgctggcaaggcagacagcaaaggcagccctcattgtactgggcccattacctgcatttgattattgattgcccttaggtcatgtagtaggcaccattttcccgatcttttcttaatcacgaaatgggggtgttccacggggacactgatggtttaatgtgtcccaacgccagctgttcagccacaaggacctttgctgcgctcagtttttcagaggacagtggccactgaggaacccataccggttcctctgtcttccaggtaatgggaattccctcctcagcggcccctaggaaaaacccaaaccttgcctgggatttctttgtcgtgtttgcactggctcctttctcccttgtaaatatttacctaatccataatctggatgatatcccatatccttcatcattttttgagaagtaggggaatattgattgctcaatttgaagcccatgtctctcaagagatcccttccccatagggaaacaggaagttccaaaacgtaaggctgcatgactccagagtgtctttccccatctttccactgtaactgtcttgcactcatatccggggcctttgcataacctagcccttgtagggtttgagaagaggcttgcactggccagcctgcaggccagtcctttttagcaatgatgctcctatccgcccccgtatccaggacccctaggactcttttcccatttatattaagctctaacaccggtctttgatctaaaactagggacaaaaaggccaaatccgttcctgtggatccaaagccactttcccctctctccctgtcctttgcagtaaaatgttgatgcagactaggcaaaagtatcagctgagctattttatctccaggggagatggcagtaatgcctttgagggactcaaccatgatcttcaccaccccagtgtaatctggatcaattccaccaggatataccctaaggcctctcaaggcagtggatgatcttcctaaaaggagccccactgtgcctggctccagggggccctgacaatctgattctaacagtcggatccccatctgaggagttagtacgagatgggaggtggtgaggaggtccagtcctgctgagcctgtagtggctctcctcggctcctttgatgctgtaaagtcggccactccccttgttcccagtgtctctcccgagtctccattgccccatatatttgtgggccctgagggcggggcgttttttggccgagtgctattaacttctgcctcaagtggcctcccgttaatgtcttttactgaccagcattcattggcccaatgtttcccctttttgcattttgggcataggccaggctgccagagactgaagccgctgcctcccgtgtcaccctcagtcttttttctgggcagttcctttttatatgtcctgccttgccacacctgaaacatgctcctgggttccccttggcacctctcgggtcagctggactaccgcagcagcaagtccggcgttggtcagtggcagatcttggtccatgtttcaatctctttatgtttgtagggggtaataaatagcagacctgcattccctggtgcattgttcatacactaattgcctatcttgaccatcaagaaagacagaactcgggaactcttcctgcagttgatttcaggagccttgtacaatcttttctgggggccccgaggaaacccgaccctctgcttcaaacgcccttggtagctcaccccagactgccacgtggcgaaagcagaagggtccacatacacggaagcaggcctgaagcccagccttagccagataagaaattgtccagcacaaagaccactcaccctcgggatggtgggaggcagaagctggcgctatcttttgggcctacaaagcgcagctctccacagtaaagtgttgtggttgctttggaaaacagtttagagcaagttccaaaccagacagcactacacagagcaaataactgaattctcatacactgttggcaggaatgtaaaatggtgtgaccactatagaaaacaaaagtcacaaagcacctattttttgacccaagtactatactctttaatattgatctaaagggatactgagtttgcaccaacctcaaagtaagtgttacagagtgagatcccatgatgcctagttttatggggctgatgagatgactgagtttgtaaagacttttgctaacaagcctgatgactttagttcaaccactaatgaacacacatagtaaaatgagagaacagactctgaaaagttgtctggcctctgacctctacatgtgtgtgacctctacacacacacacacacacacacacacacacacacacacaaacacacaccaaaaattatgataataataataaataaaaataatgaaaacgtgtttaaacagctactataattgctcatttgttatctgtcagtatttgtcatttaattacatatgcaacaggtgttatcccacagttgagctgaattaattggataaaaatagtaaagcactaatacaaagtatacaagaagttcaccatcaagagaaaaatctcttaaaaccactatatttatttatgtccagatcaattttgtcacataattacttgatatttacaataacaaaacattttgtatataaaatgttcagtcctatttcttaggattacaattgtataaggttcttatgatgtattctgactaattgactcacttggtttgtatatatatttctgaggttaagaacaattatgtccagccgggcattggtggtgcacacctttaatcccagcactagagaggcagaggcaggtggatctctgtgagtttgagaccagcctggtctgcaagagttacttccaggacagcctccaaagccacagagaaaccctgtttcaaaaaaaaaaaaaaaaaaaagaacaagtcatatccagacctaaaactattatctggaagggggaattatgtttattttcattgattatgtatggtatttacccttcaaaaactttaaactttttatcacttttttatgtaaagcaactctgtccatttcaaagtttaaaatttacaatttttgcaatctgggaagactgttttcaggatactgaattacaaaagtaattcccagacaagtttgtgaaaattagaattctcttaatcattgataactgtttacagaacatattgattctagctactgttttctctttgcaaatgacgtaaagaaaatacctgacacgggtcatttggagacctttagtttgttaaaatctcagattttaggcactacctctaaagggaacattgttgattgtgacttgaacagaggtcatctaccagttgaggcaattactagtacatttgtcccacagattccatgggagacacattcgtgatgaacatcaaaatttgtaaatgttccgatccttataaagtgcatagtatgtgcatataacctagccaactgtgtacttccatgcactttgaatgatgttaaaagtatttatagacacagtacaatgtaaatacttatatagatagctgtcattcttcatcgtttaggaaataatgagtgacaaaggaaaacatctgtacatgttcagtacaaatgcaattttttaatattttaaatctatatgtggttaaaaatacatttgtagaacacacagatatggagacctgaccatacttctccatcataatgttattaaaagaattacacaggtgctcacacaaagcagtacagtggtgcctggcacaaacacacagcaactgttaacacttgggtctcattacaataagataatcctagtttaagaaatgctacataatagtaacgtgacaagtcctcaaaaggctacatttagagtttccatacaacctagtactcctatacccgtatgaagacctgtctttcacatccatggccatattgtttgtagtaataaagcttggaaactacctaaatgtccaccaaggatgaacaggacaatatagatgatgtgtttacatggtagatatttggcagtaaaaaagaataaagtgctggtccatgctacacccaagataatccttgagaagaaccttttgatccgtctttgtgaaatgtccagaagatgagagttcatggaaacagaacatagattattggttacacagactagggtaagaaagaaaaggggactggcttctagtggggtcagatttgtctggagagtaatgaaaataccatcgaattaaattaattagctaatgggatggttaggccacacttgttgtaaaattaaaacccgctgacctgagcagctgaaatgtgttttatggcatgtggtttctatcacaataaagccacttaaaaagacatgggcttgagcaaactggtgcaaaatgccttgagctttggttcacacctggtgtggtttggccgccctatccctgttgtaataattgggggtttactggtgcactttacgttcctgctgctcttggtttgtgaaatcaccgccagaggagtagggaggtgttgtaatttaagaaaagcagcacctcgagagaaagatgccatgagacagggttcaagcagaggggctttttactagggaaagagatcataaaaaggggatgaggagactggcctccagggacaggagcatcaggagagaggaaagtggggagagggagaaaggggggaaagacagacagagatgggagagaaagaagagagaggtgggaggtgggcaggggcctattaaaaggaaacataatgaatgtgcacaggtggtgctcttagtggctgcagctgagggagtaacctgacagaaatccaaagagaggccagtacagatgcctgaagactaactgattcacatcctggtgtggtttggctgtctatccctgtaataatttggggtttactggtacactttacagtcctgctgctgttggcttgtaaaatcactgccagaggtgtggggaggggtcaatgaggaggaaggtggctggggtgccatctcgtacggcctcagagacccctgtgacaactttggctttcattaatgtggaaatgtttgccttcattcattcattcctgtgtatttgtgtatgaatgtgtgtaacgtgtatgttcacacacgtgtgtataaatacacctgtcatgtgtccctgtgtggaggctagcagtcaatgtcaagtgtcttcctcagtcactctccactttagtttttgagacagctctcccactgatttgactagctccactctctgtgagttttagggatctgctgttgccaaatctctcatgtcttccagacatgtgtgcaggttttcatggagtactggagatccaaatcaagtcctgtgtctgcacagcaagcactttacctcctgagccatctctcaggctgtgttcttttatcttaagaccactttggaaatcagtatggcggttgctcagaaaaatgggaatcaatctacctcaagatccacccattcctctcttgggtatatacccaaatactgcttgtccatacaacaaggacatatgttcaaccatgttcatagcagcattgtttgtaatagccagaacctggaaacaacctagatgcccctcaactgaagaatgaaaagagaaaaggtgatacatttatacaatggagtactagtcagcagaaaaaagcaatggaatcttgaaattcgcaggcaaatggatggaactagaagaaaccatcctgagtgaggtaacccaatcacaaaaagacaaacatggtatgtactcactcatatacgatttttagacatagagcaaaggtttaccagcctaaaatcctctaccccaaggaaactagaaatcatgaatggctctaagggataaatggaccccaggaatgggaagtggcatgaactcccgagctaattgagagcatgagggtaggggagtgggtgctgccacaataagagcacaagatgaagagtagaggagaagaaatggaggagcagatatattgagttgggggaagaatagaggagagagagcaggatgagagataccatatcagagggagccactataggtccgagaagagatctggaactaggaagatctccagagacctataaggatgacacgatctgacagtctgggcagtggaggagaggatggcctagaagcccttcccctagaatgagattgatgaatactctctatgctattctagagtcctcatccagtggctgatgagagcagagacagacatccacagaaatacactgagctgaaatctggaactcagttgaagagagggaggaatgaagaacgaaggggtctgtacctggttggagaaacccacagaaacagttggcctgaaaaagggaaagcatatcgaccccagatgctctttgggaggacagtacaggactaatccagccccctgatcatggatgccaatggggaggcccctgcactcctgggagcctctggaggtggactggcattttgccctggtgggtgggagggacttcgagagcccatcccacttgaagggattcgctctgtctctgaacacatggggaggggcctaggcccagcacaggaagatttggtggacttggtggagccctggttgggggccctaccctgcctggggagtggcgggtggatggggtggggggtaggttggaggtgggggagaaggaatggggatgggggagggagagggagagggaaagtacatgtgaaaatattaataatttaataaaaaaatgcaaaaaaatagattgttattgaggagtttgtgtttatattatacgtttatatgatattttaaaactgagaggaatggtggctacatcttctttttttcctattttttatttaatttagaaacaagattgttttacatgtcaatcccagttccctctccctccctggtggctacatcttaacatgatccccccaggctcagtcacactataattcacatttctggtggttttctgttgccatgctatcatctgaagagcagcccatggtttaaaagcaaacaaaatgcagagaagacagaaaagtgagaatggactagtgttttatttgtagtgttcatttcattatagatgaggaattagagagaggagagactgggtcaaatctttgagacctttgcaaggaaatgagtgaaatgcaacagattatggccctttgaagccaacctgcttctccaatagggtccctgctgagtccgtgagccctgggaatggagaaaggaaataattgtaacttcctccaactgtagtctgctaggtcagttccaggattatatttagtatgtcccaagtttccaagaattggagaatttacagaattcccaaaagcatacaattaagcatgttcccacttatttctttcttcctcagttctaacttatgcatctgatactcatttacactgaacaggttgaacttgttgggatgtatccacccggaaacagccctcttttcttcccattcctaccctctggtgtgctgtttcagcactccacaccccagccttcatagaatcttagggtgatcccttgaccagtcaggttactctactctcaaccaccacttcacagtttgtctcccccttctctatcccaggaaaggggtgtgtggccttttcatgccctcttcctaggcctttccatttccggaagtccccttacccaatccctgcttgcctagagagaagcagcagaatacggaataattgggagtttagagggcaattttggcatctgatgacgctcttgttatctctgtggacaagcattattaataactctctcatttagtacacacaccaccacaacaacttttctgaaacaaaactcagagcagtaaggtatgagttaagtgggattggacctccttttcccactgaccccattataacattggactctgtggataagcgatgatctctccatggcctcttcattctcctttcagcacttgctaaggtctcacgctcctgagacacacactaataatcccatccatcctatggaggccatgcaatttcaatagatttttttctgtttgaatctcagcttttccaagtatgcattgatttttttcatttctccattctttggatgtcctgagactaactggagagtataaatgtctaacattgagacatgacatcatttacaactgtcttattcaagaaccacataatcaaagttacaaaaaccaaaaaatctctctctctctctctctctctctctctctctctctctctctctctctcacacacacacacacacacacacacacacacacacacagacacacctcatgttttaagaaaatcatcatttcggttgaacctcattcatgactgtcctggaaaacgggtacttttcttggaggagtggtcctcaggccagaggctgacatctttggggcttatgtaagagtcaagcctcactcagacagacctacacaatagcaaggtccttaggtgaggattgcctaagaaatattctctctaagaatccaattcagaaattcagcagcttaatttcatatattaagcatatttacattactgttctagtaaactccaataaatcatttgtaaaccctttgctcatattttatcagatatcctaatacactgggattgaggatttcttctatctggtaattgttttttaggaaggaaacaacacattgctaagctacttactatcagtaagcacaattacagtcattgagctgacttgagagaggcactaagatgttactgttgatagccgagatagaaagctgggaacagcaacaagtacttctgtaatgtttcttaacattcctcattcttttcttcctggaactgttctttatgaacaaaacctcacaatgtcctcagtgaactactctaagtggaaaacaggaacaccagacctggctgtaattccttagtgtttggtgcctacctgggccctactactgaagagcagtaactctgggaaacaaaaaagacagattaaatggtatgtgtggggcacaggattggggctgctttctttatgataaacctggtaagcatttttactttctccttgttggcttgtggggcttattgaatctgcaatttgatatattttagcagttttgaagccactcatgatctcctcaaatactgcttctaatctgtctctttaaatactgtgtgtatgagtttgccttcatgtatgtatgcatgtctgtgctttgcctgggagcttggtgcccatggaagcctgaagagaagaggtgatttcctggatctgaagttagaggcatttgtgagccaccctgtgggtgctgagaatcgaatccaggtcctctggaagagcagccagtgcttttaaccaatgagccacatatcctggccttatccttcacttctttttggtgtttttgtttgtttgcttggttggcttttggtctttgagacagagtttctctgtgtagctttggagcctgtcctggaacttgctcttatagacaaggctggcttcaaattcagagagatccatctgcctctgcctcctgattgctaggattaaaggtgtgcacaccaatatccagttgtctttcccttctttttataaaagattttagttatttattatgtatacaacattctgcttccatgtatatcttcacaccagaagagggcaccagatctcattcaagatggttgtgagccaccatgtggttgctgggaattgaactcacagcctctgaaagagcagtcagtgctcttaaactctgagccacctctccagccctgtctttcacttcttgaccccagttatgcatctgactgactttgttccaaggatgatcatgctcatgtgttttcatctcttgtagttttctttctctcccagctctgctctatgtattctttactgacaacctcgttgaattaaaaaaagaatttacagtgttacataaggtgatttgcatgaaagtatacactgggatttgaacataatctccctcataccccactgccctcagacagtctcacctctacttacactgacctaccttcttatatggctgcctctgctcccattttctctatttacctacaagctcctgactcccttgattctgtgatactctattttgatcactcaccataaagtatctggcttgccctgtttaacacagcagaggttttgttttgttttgttttgttttgttttgtttcaaacccttgacatgaagctgaatctctccccacagaatgaagattacattcctctctgaaaatcctctctcaaaaacatgccgaaaggctgaaaaaaaaaaaaacccatatggaacaataaatacaacaatgcttacaggatgggaaacaatagttttgtctaccaaaacagagatcccatagaaatatcctgactcagtttaggatggagatgaaactggtaagagcagatgtgtaatctggtgacagggtttaaccactgggcaacagagaacggtatgatggattcttaagatgacatttgagatgcatcactactacaactaaagccagggactcagccccgcccccttctgcttttcagttcatgggataaaagccagggacttgagcaagagctctgccattgagctactgcctagcctagcattggaaccctcatttcatcgaaaggatttttaattacatttatttttcatccatgcatccatccattatcaggaggtaagaggacaacttgcaggagttggtccttagcttccctgggattgaactgaggtcccaatttaggtcatctagtttaaactcaagggatttaacctgctgaaccaccttctgggcctgttgagcctcactttcaatttaaatcccagggatttaaatccagaaggatccgccctcccctgtgtcgctaagatgctaccccctctatgaagctggaagcccaaggcctttcctgtaagaatcaattaggtattaactaactctcctctttgaaatgttactgtctgcgaatgaatccgcttcagggagcaatttcagtaaacattagacgtaggaaaggacagtaaatgatcctgtctggtcttgccttgttcaaggagaattctaggctggagctgggctggagcactaccacccagaggttggaaagttcagaggggcttcgaagaagaactgataagaatcagcccgtttcagaggggcttcaaaaaagaatggataaaatcaaccctctcccagttccgggaagtgttttgactgaaaattccaagtgctagaggttatctagggatcctgaagctaagaacagtggagaagggcaccccctggcgacagtagccggaaccaaagggaagccttactgggctaagagtgtcagcccaagctaggctcccatgggagctgtatttcttcctgccaggttgcttaagcaagtgcaacctgccacccttagctgagtgacataggagccccaggagatggggctcgctctaggaagcagtggagtgtcccccagaggattcggggggcacacctaactaatgtctcaaatattttaggaaacacaaagtgaaacaggcattttgaaagtgtagctctgactatgctagctgctgtttctgcaaagccacatgtgtgggcacggagcatatctggctgcagggagtggtatccagcgaccctgagcagtaccccctgaccatgcacacaccgacttccgaagagcaaggccttcaaggtacagagacctagagactgtcattgctcttagtacatttgggtggacctgatctttgtttccctgggcctcccacgagggggcgcagggtggactccgggtcctgagctgacatgggtggccttcctgcccagaactcagctcaggcagcaggctttcataaacaaatgcttttcctttgccccggttgcttgtttatatctgaaggaatgcaccagaaattgaaggaactaatttttattcccgcacaatctctcatctctgtaattctattaacgtgttagtgtgtaatgcacgtgagtgtgtgtgtgtgtgtgtgtgtgtgtgtgtgtgtgtgtgtgtgtattgctgggttggtgttttaaagtgacagctaatatagagatgcctctctttgtggacgttgggaggcacaaggaatgatttttccttttttttttaaagaagatattttctggatgcaaaacattggtaaaggaagggaggaaataaaaggactgagaaactgggattgtggaggaggggttcagagatgaggaaagcaccaaaaggcatttgtggccttgtataatcttatgtgaggaggatacttgggagtgccttaaggctttgactccctgtgtagatcaaagcaagcagtgtaaataaaagagtcaggacagtaatagctcaggaggccatgtgcctgaatcaactgatgctttgctgaaatatcaacaaagactctgacaaaacctatgtttccaagactgtaaagcagtagtggaaaagaccatacagaagtaggacctcctggctctttcaaggtactctgagcctgaaggatacacagaatcatagaacaagggctaacaaactaccacccagaggccagatatagcttgtcctttgcttccataaataaagttttattgaatcaagtgctcttttatgctacaatagcagaatggactagttgcttacaaagccagagaaaaagtttattatttggcacttaacagggtccagaacatcataacaggcatggttcacattcctgtgattcttgagacatgagggctgtaactattggagattgtatgctagggaccctttggaaaagcacagacacccacatgaggatttgttttgtttgttgctttgttattgtttgaaatagttcagtgtttttcctgtgagatataatttaatttaaaaataaaaggttctaggataaagggttgtctctggtcttgcattattttataattatatctgtaagcttgttgctctcaattgcttgtgctaaagagaaacttagtttttaatgatcagaagaagatgggaaacatatgtggatatcatcattgtcaatcatttggggatagctgaagatgttggatgaacttagatggagatggctttgtctatggtacccaagtccgcggaagctttgcattagacactcctaagaaaggagatgctcacatctctggcccgctcagacctgaaaaactaatacaccagttaaacagatagacttctgcaataaatgcctgaaaaccccaacctatatttttgtagtatcttgattcaatataaaggtattcatttatttctcttttgaaaaatgttttgactgatatatgtcccttagcattctagatcttgacccttggatacaacaaatgatcctgtttattgctactgaaatctggtagagtttgtttcttgagccttgataagaaacaaagggatgagcagcaggctcagaggagaatgagatggccattgttgggatggactttcaaggagttttcttccttttagaatatgaatagatacagaaggatttaattagttgacagctatgctattattagagggtaatgctggcattatttcttctgccatcattccaggtataaagcatgcattgtattcctcaatgtttggtttacaatgaagacacactacttcagaaggcactgccaaaggatccaatggcagtgccttgagcaggacagaagcagagttttgtaatgtgtttatctttctggtctgaatggttccccgaaatttccttctcagtcatggtgaattagcagacacttttgtatcccatttggagagtgacaaagaagcagccatgtttatatttatgcttggtagcagagagcagatagttttgcagttcctaacacacattgtgctcctctcctggctctgaaggaccagcttccctttcggcagccataacagccgaacacatgcttgccataaacctgccttggtcacttagaggtcagatgcctgtctcgggacaaggaacctatcagaagttagtcactagaaagtcagatgcctgtctcgtgacaaggaaccaatcagaagttagctggtggtgctatgctttacgaccctgggtgtgctttatggacaagcgcacagcaatgacatagagagcatagcaaccactctgggagggcctatgtgccataacaaccagttggccaatcaacacaggacaaaccctccaagcctggaggcacaccaatcctgagcctgtgcgtacccctagacactcccctacactgccctgtaaagatctgtgtgcagcggcttcaaactgtctttgctagccatctgtcatggtgggtggatcaaagaccctagctaacatggggttagctcgttaaactacaataaagcctcatgtaattttcatcaagcttttgcctccattctgtgattgcggtggttgcggtcctgggctaagattctggaagcctgggctttctgagggtcttacatttgggggctcgtctgggatttgcgaccacccctcacctgaatggagtcgatcttggaggtaagtgggtaccctgtattgtctgtgtttgtgtttttgtgccggctgaaatctggttctgtgctttgcagtcgctcgtgtctcaggaagagataagagctccggtctcgggaggagatagagtgtgatcagtagacgtgcttgggagatcaccaactgccaccctggaagacgttccagaaagtcttcctgggacgttccaggaacgcttgggacattcccatctgggagtcgttgagggtacggtagttctcctggattggggaagttatccgtcctcctggccatctgtatttctggagtggttttgtctgtctatgtgcagacagatatctgatagtttttgtctgtgtgtcttgggtttgtttttgtcttattttgtcttactttgatgatgggactgaccgtaaccaatccccctcagtctgacttttgaccactggacggacgttaaggaccatagttagtcagttatgacaccctcttttgttgagtcacatggcaccatactaggtaactttattttccagtctttgtttctgtatggtttctgtacaagaattgtttagggcggaggttcagatgacagcttctgcagtctgtaggagtgggacttggcaggaccaagttgcttgctccatctgtaaggggtcccaagcgggtagcccaatctgtaggacagggacttgctgggagcaagttgcctggtccatctttaaggggacccaagcgggtcgcccaatctgtaggacagggacttgctgggagcaagtcatctgaaattccgaataggaccctagtctgtgttactgtactgtctgtccacgtttcacatttgtgttgtgtgtttgtcaagcatctctttctgtccctactgcccacgcacgtggcatgcatgggtcaggggtcttttcttgttgccctaagcacttggcacgggaaaggagttctgccatgtgtcacgggttagaatgtgttgtgttggagtcccccgaggctgcttttctgaactcaaaaggctgctgcagcccttacagctgagcctggccgatgtaggtgagcatttccctatccccacctgctggtcccgtgggtccctgccatttgcctagctgcccagccttctttgtgctctacatacatagtatgcagggggactgcaggggtctctttcccacccctgcattggccgagggtctgggattaccagcagcaccccctccccccagttctcttccctgagcacatggaacttgctcaggcgggtgaaccatctgtcctgatctggatgttctaaaaaacggccttaaagttattaaaaaaaaaaaaaccttaaagactttgataagagtatatgttgaccaagaaatgagagaaaatgtaggagactaaagtaatagagaaagaaggaaaaaaaagaaatttgtctaagaatgtttataggaagttgtggaagttatagagggttaaagcaagtcgtagaaggtcagagaaaagttgttgaaggtcagagaaaaggttgttacaagtcagagaaaaatgtaaactgtaaactgttatggtttctcatgtctgcaaatagtaaattttaaaattggtaatataagttaaaattttaaccatattaagctaattttgttttaaaagtcctgtttatttctcaagtaatttatgtatacttgttttaaaatgttctatttcctggtataacctaagttctgttaagcaaagggtgcaagtttcggccattttgtagccagccacagggcaaactggtcacatggctgactggtagccattttactaaagttaaaaaaaaggatacttaaaccgccatcttgactaaaggtgaccacatggaaattagaggtaccatctaagaaacaagttttttagttaagatttaaaatgttaatgcttctatatattacagaaagaccttaagggaatttaaatttctttttaaaaccagttttttaaaatgtttgttttttattaatgtttgtacttaaagagcttcaatttagaattatttttaagcaaagcctgacaatgtaaagttcttgttttgtgaaagatgctgatctattataagatgttacagtttgttttttagaagttaagtttaggatgttggtagcacacacctttaaaatcagggtgttgatggcacacgcctttaagtttagggcgttggtggcatacacctttaatcccagcactcgggagtaagaggcagatggatctttatgagttcaaggcctgcctggtccggcagatcgaattccaggacaggctccaaagtcacagaaaaaccctgcctcagaaagaagttaagctactgtttaaggaatataaggtagctctatgcagttttaagttcagctgtgctaagttccaaatattttactaagttaaaaccagttacagtcagactaaaaattaattacagaaataagactttacctagcccctgtatgcttcttgtgtgcttaaggcaagtaactaaaacagacaaccagacctctaatgcttcagagatcttcagaatatggcatttaaattgttatctttaaagtttataatgtcagacagactgccagatcctgacagtgacccaaagtctccaaagattatgaggcacctgccaggacctagccgagactgtggacaaagctgctggacactggaaattgattgtatccctttgcctagacaaaacaaggtcagtcttttccatgtccctcttccacagagaagaaaaaaacctctcaccttataggcctggcaaagattgctgttctttgagacatctgcccccagcggtaatggagaaacttgggtatggctaactgtatatggactggcttctaactggcttctgtcactttttagtagattcaggtaaaatatacccttctcagatctctgaaatattactggttgtcagcttgacagcatcaggcagtcagatccactatagactagtcagtatgttagctgataaagtgatgactatctactgttcaggcacaagctcaaggtttttaagtttattttggttgtcatctaagtacaaacttaaagggcttttcatcaggccaaaggcacccctgtccaattcatacctggctctctggacagaagaaaaatgtacatgcttatagcccaaatctgtagtttttgctaggactcaaagttataaatatgttcctgctgtttgaacagatatccagatatctgctttttctgcactgtgggcttcagtaaataagttttaacctctgttcctagtttaaacatgtcttaaacaggtttctgcttctggcagacatctgagtatcagttgctgactacaggctgttctaagtagactgggagccctggacttgctgtggatgtgaaccagtccagctgatgtggacaccccgtctctacaacagtgtctactaaccagaagctcctgatgaattccccattgcctaaattccttttgcttggggtccctaacttcatcccaaagtcagcaggaagcagattggaaaagaatttcgccgccctttttccctggttaaaatgctaagtcaaaaggaactcccttacatggggatgccaatatctatcactccctgatggggatgctagagagacagcaattccatgattggaatttccaaaaaagaaaatgggggaatgaagggatcagcttccctttcggcagccataacagccgaacacgtgcttgccataaacctgccttggtcacttagaggtcagatgcctgtctcgtgacaaggaacttatcagaagttagtcaccagaaagtcagatgcctgtctcgtgacaaggaaccaatcagaagttagctggtggtgctatgctttacgaccctgggtgtgctttatggacaagcgcacagcaatgacgtagagagcatagcaaccactctgggagggcctatgtgccataacaaccagttggccaatcaacacagggcaaaccctccaagcctggatgcacaccaatcctgagcctgtgcatacccctagacactccacttatgctgccctataaagacctgtgtgcagcggcttcaaactgtctttgctagccatctgtcatggtgggtggatcaaagaccctagctaacatggggttagctcgttaaactacaataaagcctcatgcaattttcatcaagcttttgcctccattctgtgattggggtggcctgggctaagattctggaagcctgggctttccgagggtcttacacaagcaatttctgagatttatataaagtttctgagcagaaagttttcaaagcagatctaagctttgaagcccccatagctgacaaggcctcatttgcatcttagctgacacactcaggctgtgaatctaacaggcagctgtctcctgaggctttttctcaaaaacctttatcaaatcatgtgtcaacatttactttctagatttccctttacaactataaaaatttaggatgatttctgtgtcttctcctctgccaaattctatataatcatccacagatttcccctgcccttaaatcaacactacaggcttctgttactttttcaccaactgactttgaggattcatatcatcaaccactcctgttaagacattggtagctattttactatatctgaggcaaatcatatccaaggcaatttaagcagttccttttgtcagcattcatgcattcacaattatatatatatatttgaatgatatatatatatatatatatcaatttgattgatatatatatatatatatatatatatatatatatatatatatatcaaagtttcaggtgtggccacaccaaacatttataacttgcatgtatctcacatttctccttttgtctaggttatgatcagtttgttgaactgaaaaatccctaattgaaatctctcataacacagcagttacagccaattcttgcattatgagcattcaaattttgaacacatccaaatttacctatgttgcctttgtttctctataagatctcagaacagtttctgaatggctgtattaatagcattttcaaacatttgactggcatcagccacaggggcatttcccaaggctgcaagttttctaagttctgaccttggcctatagcttgccttctgccctctgtagatcatctgtagctgcttctctctcctgcatctccggcacaaatctagttccctattttctcttttattggtactctgtcagacccagtgcccttcctgacctgtccaaagcaacctctaaaaggttctgtgtatttcttcctccctatgccttgctttcactgaagaaataagatattaactaaagtttctgttggtctgacatctaaacaaatcccaataaacccattcatgtcatttttatttcctaatgaaaaacttaaaaattagcaaagaaatatagcccagaaactgaccaaggctactactatgacttcgtgcctggaatttaccagccaccagcaattactcacttacaagaccataagataactgggtaccaagaaatcccagatgaccaccctccccgaggggcttatgaaggaaacagattgccccacgggccaatgtgtcaatcattaacaattaagggtccctgtgaaacaaagagatagctaccattagttagcacatcctgaggtctgcatgttttacaactgcagaggctatctgattcccaggcctcccctgaagacaaagggtttcgtaggaacctatgactctggtcacattttcaatggacagagagtcaaggcctctccctaagcttatggtttttgccttaaaacgcctgagcctgaaggcctgggctgctctctagcctgcatgctgagagagcctgtttatacaagtctacctttcattaaagcctcttgctgtttgcatcaaatttcagcctcctcatggtgattggggtggctgcagtcctgggaaaagattctggaggcctgagcttccagtgatcttacactaatgctcgatttttctcatttttctacttttatatatgtttttatttctgtttttttctatatttttcttttcttttttttatttctttttaagacagcatactctattttcaatccagctcctttgggacctgaggcacccttatagtaccttaccagcctaagtctctcaggagttgaggcagccatatcaatacacccgttcctaccttgaggctggccagcaattccaccaatgatccatcagtgtgcattcccttctttctccatcttggtgagcacctccactatgtagtgtccagaactacaacttcttactggttcaagcaaggaatctacggatttaataaaacaagacagccagtcattcttgaaagaagaatgccaatttatttagaggggagttgactcatataccatcagcagaaccctaggaagtaactcagattaaagttcccgctcttaactgaagaagatgcagataactgacaagatgcagataatctgcatatttgtaaataggccttattggcaggagggaaaatgaggaaatagcacctaaacatgaggcagccagtagctccccaaggatactgcagatcaaatttagacaagagaagaaaagcagacttctagggggccctcaacatgtctgtctgtctgtctgtctgtctctccatctctccctatctgtctctgtattttcccattctcttcccatctctgtcggttcagagcaaaaagattctttccccaacatataagcactaagcaaaccagagatgataaactctcaggactgtctcttccataggagaaatgtatggcttgtgcttccacccagaaactttggatttgaggtcactaataacattgcggttgtgcaatctgtagagcaaggatatattaaactcccacagtaggcccagagctgaccaatagtctaggtggcctttaccttatctgaatggtcagaccctctccgaacctccctaaatcagggtgggttgtggcaaataccgcaaatgacatctatgctattggtttggctgacaccacaccacatcctttcctgaataatacctgaagcctatctctacaacccatcatcgtggaagcagtgaaatgtacttggagttgagattcaatgtaattatgtgtgcacaatggattttattacaccagggaactttttgttccaaattgtactgtacttaaatatacttaaaacacactgcttggggttagaatctaggagtgtgaataacactggctaactaatttgtgctcacccagcttttcttcttactttatgcagaccattaatctgctgccacagaatgtgcagagaccccggaaatttgtccttccctcattctctctgtctctctctgaaagcaccaaatgcatgggtaatccttctcttccagagaacttagaaatgatgaacagagttccgtaggaagattcatcatggcccaggtgaaaggttcaggcattatgctggcctgcccctcttacctggtggaacaggcagtaccctggtcagcccaaggttccatgggaactaagtctgcacgtatgagcagaggacccctttaaaagacaggtccctgctcatttaccctctctgtttcctctctgtgtttccctgctctgtttcctatcagcttcctttctctctactctgtctcccacctatgctctctctgcctgtctatggcgaccggccatagcggtcagccatttacccctgttcctcttcttagtctccctactctgccaggcattataataaacttatagtcaatatgtgtcatgtctcagcatttctcttttcttctttttaaacaaaacaaaaacaccagggacatcagattcaatcctgcctttctttgctttccctgcatacaacagcccacacctagaattagagattatgtccacctcctttgggaaataaagccattggggggcaactcagagctcccgaacaatggacatcagctgcccaggaagatgaacctttactgggctcaccaagctcatcaggctcaccaggatccttctggagatctgtgcccaaggtggaggcacagcccttgtgcatgagctcttgcagcaggaaagctgagcagcacagaggcacagcctctgtgggtattggggacagagaacagccaggtccccactgcccacctggctactcaggatcccccatgtacttggagagctccagcttttctcacactgtaagcactcatttgcacaccacagtcctagccacctgctggagtgatgggaactggagacccaggcacagcttggtcactgattcaatgaccatgactgtcacctgacaagtcttactgccttctgctctctggttaacttggctccacagttttttttttattttgttttgtttgtttgttttttttaccattgtgatctctgtcttctgtctcattatacaacagcagctctcatcctcctccatactcatttactatgaatgattttatattcaaggacatataaatagttgccaaagtgtggagacaatcagtgtagcactacatgcaagggaaaacacctctactggctgatactttaaacctgaagggaaatttcaaacatacaagtcagagacatttacataaataatgctcccaactatgttagtatttctctctgttatatgtgtatatgtgtgtgtttaaatatacatacatacacatacatgcatatatatctgggtatttttagtttctttggaaagccttaagtatctctcatcaaatgtaacagaatttccacttttttgtctcccattgggggacagaaaaaatatgtcctgtccatgggttaacccagcatgggttgggtagaaatcacctgtcacagaaaccttgaatagcatctcacgaggtcttgaggtctggtgagtacatctcaggacaatgaggggctgggtgtcaggagatgggcaggaggacactattagcctggacttctcattttgaactacagaggtgggtagagtggtgccttgtccaatcctgtaggtctcattgataattctctctttgtgtgagatgaacatgctaaagtctccccagatattttgaactacacatgtgaaacagacttaaaagctaaagcgagctccctttctcccatccaacttggtgcacacgttactgccactaaacaaaaactcttgaccatcaggacaatcattgttcccttttcattggcagaaagagaagccacaggacagaacaaacgaatataagcagaaagaatcagacctggacacacacaaatgcccgtcccttcggttcactcaaactgcagagcagggaaatccttaccacatgttgttagacccccgaaaactcaagtatccggagtcccaggccacgttcgcggtcacccaaatcaccaggcggattcgagagcttcctgcaaactgcacgaggctttaatgtaagttaacgagctaaccccatgttagctcgggtctttcacccacccaccatggcggacagctagaaaagatggcttgaagctgctgcgcatagatctttatagggcagcgtaaggggagtgtctaggggtacgcacaggctcactattggtgtgcctccaggcttggagggcttgccctgtgttgattggtcaactggttgttatggctcataggccctcccacggtggttgctatgctctctacttcattgctgtgcgctagtccgtaaagcacacccagggtcataaagcatatcgccaccagctaacttctgattggttccttgtcacaagacaggcatctgactttctactgactaggtcaaggtcatagaagcacatgttcggctgttatggctgccgaaagggaagctggttccttcaatggttgttgtgaaggtgtcagctgctgtctggttttacaccaggatagggctcctcagaatcccgccttgactctctgctgtcctgtggtctttctcaccacctgaactctcagacagggctgggaaacagctctgtgagctgtgatgtgttcttgatgtcaccagtaggaagctgaaactggaaagtgaaaatgaaccttgctggcttctcatcagaaaaactgagaagtaacagggattggtcctcctgccctctcctctgtcctgatggtgagaagcctctgtaacacactgacatgtgagttccattcagctgtccagagagagacatccctggcaccagaagatgctgttagactggaattgatggaggtgatgtggatataaagaacccagtctggcatcttcacaacacaattgttcctcagtctaaaggaatgaagttgtgcactctctccttggaacggagtctctactcatgaggctctgttgttttaggatttgctaagaaggtaatggggaagtttggtgatggaagagtccatctgcaggtcaggtcccctgcagtcaggaagtggttcatcccagcttgcctggtgtggttatcctaatgaacctctgcaggtgtcaccttctagtccaattggatcacatggaatttgcttccctttgtcttgttaagtgcctgttttatttagggcttttattgttgtgaagagacaccatgaccacagcaattcttatgaaggaaaatgctggcttacagttttagtggtttagcccgttatcatcaaggcaatgtaaaggcaaacatgcaggaggagctgagaattctataacttgatctgtaggcagcagaagagacctgaatcccacatttggtgtgtcttgagcatatgagagagtaaaacctgcctccacagtgacatacttcctccaataaggccacacctactccaacaaaggcacaccacctaatagtggcactccctatgggggctattgttattcaaaccactgcattagactcccaggcccccatagccttgtagccagatcctaatgcaaaattgcattcagtgcaacttcaaaagtccccatagtctatctatttcaaagtcacttgtgagactcatgtaatctctcacatgtaatacccagtaaaatcaaatgaaaaagcagattacatacttccaacacacagtgtacaagatatgcattatcattccaaaatggagggaagggagcatagggagaaaatacggatccaaagcaaaggcaaaaaccagctgggcaaactccaaactctgcatctccccgtctgaggtcaaagtgttgttcagattcccaattcctttcatctttgttgactgaaacacacttctttgtcttgggcccattattgtgatggcaggaagcatgacagcattgagacagacatggtgctggaggagggctgagagttctacatcagatagcaggcagcaggaagagaatgacacactaccctggttgagcattgggacctcaaagcctgcccctagtgactcacttcctccaacaaggccacacctcctaatagtgccccacctgatgggcctcctggggccatttttattcaaataaccacagggactgacttgagcagagaaacatgtcttgccatggcaataatttactaaacttctgaactgtaatccattcccaattatatgttttcctttataagagttgtcatggcaattgtgtctcgttacaggaatagaaaccctaagaattcgaatctattgaatattgttgatcacttgtcaggctgtttaattcaaaggacactgacccagaaatttgtttgttccacacactgcctggaaagcaactgactggagatggccctattgttccctttctttgtgtctaggtaccctggagttgtggggtttttttgtttttgttttttgttttttgttttgtttttttcctatttgcccttttaggggtctgcaacccagatcccaaataaactacatggagacttattcttacttattaattcccagccttagcttggcttttttgtagtcagcttttcttttctttgtttttgtttatttgtttggttggtttcttgagacagggtttctctgtgtagttttggagcctgttctggcattctctctctacactagtttggtctggaaccgacagagatcctcctgcctctgcctcctgagtgttgggattaaaggcgtgttcccctaccaccctgctgcagccaacttttcttaaattatcccatctgccttttgcccttgggcttttacttttctcaattctgtatttccttctttccttcttactcctcggttggctgtgtggctgcacagctggcccctggcatcctcatttccttctccttttttgttgttgctcctccctcttctctcttctattaattctctcagcgtggcaaccccacctatccttctctccagcctagcaattgaccattcagctctttatgggactaatcagatgttttagacaggcaaagcaaaacagcttcacagagttcaattgatgtgacataaaaaataaatgcaacacagctttgcattattaaacaaatattccacaacataaagaaatgtaacacatcttcaataatatttcacaacactccccctattgaattttttcaggagatgattcataaatctagtccattgtcaattgggactaccagtacaaatgtcttataaacatgcaaactttaaatacattattttttattctcttatttgatgtgtgtatgtgtgtgcctgcataagttgatgtgtactgcaggcatggtggggtctatggaggcaagaagaggggatcctttgaaaccagagttacaggtggttgtgagttgtcttatgggtgttgggaactgagtcaggttctctgaaaaagaaggagggctcttaatcactgaactctctctccatcccaaacacactaaccttaatacttacagtgaaaggcaagttgaatgtttaggcagatgtcagaaccagcactttagaaaaatctgcttctgtattctatagtaatgccctggccagggaggagacacataaaaaggccactaagttgcctttttggttacaatactattgaaatcaaaaccttaaagcaatggatgcaaaaatttattggttgaaggttaaagagcctcagtcctgaagcatcagaggaggaacttacctcacaggaagaggtttcccacaattctcacagtttatttcccagttagatttacacaagcatatgtccaggcttctgttttttcttgcctataaatttgtaactctgcttctggaaaaagtggagaaagaagaaatctttctcttcctgatttggccaaactgtaaataaataaacctatattccctttctaatttctgcttcttggtttctctttagtagaggaggtagcggggattatagacacagtttcctgataacagtttggacacagtcacaggatacagcacctggctaagtgatgcctagaggtggaattttctctcccaccagcatttcccaaaaaaactcccactgagacttaacattacctgtaaatgctcagccaataactcagacttattatagctaactcttacatttaaatcaacccatatttctaagtaattttagccatgtggctcctggctcattacctcattttctctatgtcctgcttgttcagctggctggcatgtctcctgcccctgccccttttcatgatagcattctttccttctctggctgtcctgcctgtgcttccaatctggctatgggcatgtcagttttttattaaacaataaataataataataataataataataataataataattataaaaataataataataaataaccaatgagaatactacacattcagagtacagaaggattattccacagtattttcctctttttgtctatataaaaaggaagttttttaatagtataactatatataacagaacagttattaagcaagaattatagttagaatatccagtccatttgtatttgacaaaattagagacaatattttaatatttttctcatccattgtgattccagttttttttatcctaatttaccttttatcataactaaggaaaactatacctatcaagtcttcaactccagcaaagacgcagaaggatgaaacattacctaatgacagggctatcaggcaccctggacagtcatccaaagtttttctgtaactttggggcatccatttttggcccatagacctagtatatctggcacacttttctcagaagcaggaaattttgagggactgtcttaccttgtcttggcaatgtttggtagttgttttcttttgtgtcccggctatacattatatttttaaatgagctgtttatgtataatagcccaaagaagagtagaaacacacatacaacataacagatataactttcaatttgcatcaataaactaaaatccataccaatgtaaaatatttaagattaatagttgttttttttggattaaagtatgttcagtaatctacccttttctcctatcatttctatatccctccattttcttttcagaaagagatccttgaattcaatcttgcttagcatttttcctgaccattaccagtaacaacttgtgaccagcctattccccaactcatttaggaggaatggggtcatagttatctagactacttcctgttgattggggaaactggtaatctttgggagacaatgagaaaatttaggattatggtgaagtcctgctggagtattctgtgaggctggatcatctcagctagttgccttgaagctgttctggatgtagaactcagaagaaactacaacagaggtgctcgaagatgttggatcatctgagccatttgctcccatcagtgatttttcaggggttcttcctctatcatacctgatttttctacataaaatgaattaatagcctcccctttcctgtggaaacaaaagcatagtttccctcccaaagtgacgtatcttttgccttaaattttgagatcaagacagtttttaaatatataggttagtttaaactgtcagttttcagaatccaatgtcttttaccagatatcatttgttcattaacagtctcaagacaacatgtaggatctagtctttctgtgtagttctcatctttacatgtgtttttatattttttattactctatttctttttaaggactttataattatgtttttcaatctaagaccatatattcttttccttctctctcccaagcctatgcatattttcaaacacactgtaatcctttaagaggttatttttttaattgaatctgtctttactgggcatctctatctttttctgaccacatgagtcttcaaacttctaagagaccaaagcatctttggtctgaagccagaagtggctggctctgtccagaccttgtgactttcttcgtgaaggttgtaccagcacgagagccatgtttaccatcacaactctgggaagctgttgggttcacacagccaccatgtagtgggccactcgttactcataaaccccatttaagtgtttggtagctgggcatcttaaaagagatgagtggtttttgtccttagcaccaagccagaaagctgcctcttaaaggagccaggtctctgcttgccaccagcaaacagaacccagcagtcaaaaagtggttaccaagaagccgagtttgactccatttttgtgtctctagaataattttctttttaacctttctcaggttttatatgttagttcatgccccacgttgggtgccataagtaggtggaaatttctgtcctaccaacgactttcaaataaacacactgagccttaatatgacttgaaaatgctcatacaatagctcaaacttattactgtctaactcttacatttaaattaacacatatttctatgtttggccatgtggctcatgtcttgttgcttcattttctatacatcttgtttgcttggtgagttactggcatctctcctgactctgcccttcttcttctcagcattctctctgtccctgactatctttcctatacttcatgtctggctattggcctatcagcttttttttatgacaaatgagaacaatacatattcacaatgtacagaaggattattccacaacagataaatgtggttagaatatggagaaatttccagctgtttggcatactattctgactccctgactcctaggtattagttgcctatgaatgtcttgtgataaagaggaaagtttttgttgttgtttttttttttttttttactttaactcattctctcttgtgagaagcactcttagttgtttagctttatgatttgcacagtttgtaatgaactcttccagttaagaccttggtttgttttgtgccctagataacaaattgtagagaaaatgtgattgaaatgtccctcagtgtgaaggctcagttgaggcagtgactaagcagttgaatggttgggtgactggaaaccttagactcttttggagaatgcccatttttatttgcagcagagaacagtgtgctgtgtatttagattttagtttaatcctatctctgtgtttgaggtgttatggtcacttggattcatcttgggtcactttgaagtaccagctaatgtgagataaattatctgccaggtgtgaccttcactaaacttaaggtatggttatcatgatgtacaagctcagaaagcaaagggaatttgtgtcttccacttgagtttcaaaagacttgggaggaatctgcattataatttgtataggtataggaaataactaaacataccatgtcttgatggcccacaaggaaaataccagctggttagatttttataaactaagagcacatctatttaatttaactgcttgtgtctatgacaattgacttgatgaatgcagaaattttggtgactgaggcaacagttccattaaaggtcaatctacatgagggtcccatgaactctaaagagatatttatggcttaaccacccggtgcatttagcaggagagggcttgtgaacaccaaggacactgactcttgtactctttctgagcaaccagttcacgtgatgtgttacttttcttacttctatgataaaataccacacaaaggcagcttaaggaacaagagctcattttagctgacagtttgagtgttcagaatgtcatggtagacttctcaggaacaatagcacaaagacttgtagattcacaataatgaataaaatattatacatactctcattaggaaataggaagcccaggcaggattaatatacattctagcttaagagtacacacacttctcttccatattttgttctaagctaatgaatttcaaaatagtttcttctttgaagtacacaaactttaaagaaataccttcactctttggtttgttgtagtgctgttcaccaaaggtgagatatggttagcctgtgttctagcaaaaaaaaaaaaaaaaaaaatccacctcttttgtcttgcacaaaaattaatttgcaatggatctaagaccttaatttaagcatgaaatactgaaactcccagggaagtcacaggagattctcattaagactttaggttagacaataactttctgaacagaactccactagcacaggaatgagtcccaagcattaacagatggggcttcacagaatttaaaagcttcagcacagcaaaccatgaggaaaccatgagcagagcacacaggaagtccacacaatgaaagaattttttttcctagttatgttttagcctgggaccaatacccagaatttacaaagaattacagagattgaatacctagaaaacaaaaccaccccatgaacaactgggataatgacatgaacagaagaagaagtaccaaaagaaaaaaacccactatttttaagattgtaaaatgtccttaatcatcaaaacatgcatataaaaactgctttgaggtacctcctcacatgagtcagaattgctagcatcaagaaatctgacagcaaatgctggagaggatgaggtggaagagaaacacttactcatcactggtaggaatgcgaattaaaacaactattacagaaatcagtttgtggatgcatcaaaaagaactaaaaacaagtaccatataactatgggaatatactgcagaactccatatcctactttatagatatttgcatacccatgttattagtgctgtagtcacaacagcaaggcaatggaaacaacctagatgtccatggacagatgaatggataatgaaaaggcaataactatactaaacagaatattgtacagctgaaaagaaaaatgatatcatgaaatttataggaaaatggatggaattagaaagtgtgtatgtatacatatatacaggcatgtaacacaattctcgaataaagacactatgaatttgaaagagagcaatgagggtttagagaaaggaaatggaagggagagttgatatagttatagcacaatatcaaaaataaaagagataagtttttaaagatgcgctttcctcacaacctataatgtacgtgtgtgtgtgtgtgtgtgtgtgtgtgtgtgtgtgtgtgtgtgtgtgtataaacaacaatacagagattaagaagggctagtgggtgatgaggaaagacacatgagtcttcaaagagattattaaactaattgtttttgcttcaacaatttcaaatctttttcttcctgtctttttttttttgcaggagacaaatatttaacaacataactgatagtaaaagtgtgaaaccctaagtgaagctccctggcttcataatggccatcccaactgtatagaagttaactgggatgcatagaatttgagactggataagtgttcaagtgtttgagtggcttccttaaaccagctgtatagtggttttatttgtgggctcattaaaataaagtgatgttttttatagttgaaaaagaaaggaagaaacaaattcacaaaacagtttaaggagggaggactgtcaggcagtcacagagcatgtgtgtagagaacagaaaggatttgcatgaaattgtgtaataggtttcctaagtagaaaacctacactcttagctgccatttattattttggggcatgttatccaccaaatgaaacttcctaagaaggcacaagcactcagagcttttcttcaaggagagacgcgtcaggatatgtggatggatggaatggcagggagaaaggcagagctgcatataatgttcccagtcttcaaaagtaagcctctctctagtttccattgttcttttcttttaagagcatcccccccaactatgtgctcatcatacactctgtttgatttttcttccaaatactgctctctccacggtgtgctttgtgactctctttatgccaaagacacactgggcaagagtctgaagacctaatctgcatcctggatcgttgccaaatacatgatgcccacatgatgcacacttgctttgtttcccaaacagttactaagcagtaatttgtagcaccaaaaatttcaaagtcacgctgatctccatttaagccacattctgagtattcgtttcagcatttgctagtgtttctatttcttttttctaaagctgggcaaaggctagtttgaagaaactaccttaaggaatatttgcacctcaacactcacttggctttttagatggatccttttaaataaagggctagaagaagaaagctgagaggaagtagccccccttttccaaaatctcttctcaccccgcctctgccaatattgggataggctgagtaccagcactgaggaggcactatagacactgtgcttggctgtgtctagagcttttaaacaagccagaagatgggaaataatgtctacactgcctcaggttaaagctcagaactgaagtttagcatctacatagggatgccacccgagacacttctctcaattactgacggggagcaattgtagtgaggagggcttctacctaatgcttacttaggacagactggactgggaagactggtcctctggtaaaaacaatgctcacattcctggatgcgtttaatcaaccgacactgtatccctctggatctcaccataacccataaggaaaattctattactactcagattaacaagtgagtaaatctggcttggaaatgtctgccaaagagccaaggtgacatattaaattagcagcaaagttcagtaatgaccctgtctacagtgtctccaggcagccctttgcctcttcagtacagtcaggtgtgcatacaagagcaaaacacgtttatatccctcattatctgcgggctggggagaaaagagaaggtcctcaggaaaagatgtctgcagctgatgcaaacttgggttcatgaccatacctgcctcacagggagtctggagagcacagtctagttgaaggcccaagttgacgaagcatccacacgtctatgcacagcagtttattgtagacttagggaagtcaataaccttatcttttaatgcacagctggaaactgctctctgtccttgcttatctggcaatgctgctgcctacaaaagcaagatatggaaactaacaagatagctcaggagcaactcacaagggagtttcagaaccacagcttttcaacatttcctcttaccctgccagctggatgaataattgcaccatcttgggctcagtaaattttaactaagcaagtaagttgcgtttgatggacactctttgtgggtgtttgtgaccccataccaggggactattgatcccactgattgagaataagaccaatactacaaaaagctaaatttgaagcaagctttaattcaatactgtccaggcagatgggctctagtcaagtccagacccaaattctcaggaaatggccccaagtcacagtttgcagcagcttaagaaggaaaacacataattcattacacttgccatcaggaattcattgcatttcccatcaggtctgatcctgggcaagcaaatagccagatgtacctacagtctacatccagtcaggggcaaagatacaacctgacagatttcttgcctataaacctcccgcccacatgtgatgaagaacatctggtgcagatgggtcaaacaaacttgtttaggggagtgaaaaacatgggacttgttatctcccataaacaacagcctccagcatttcaggaactgtcctcgggcaaagggcttacagatcagaggcatttttgtttcatggatctcctaaggcatagtcattgaaagttaaatgtaactggggttctgacagcacccagtggaacagtttaagaagtatgaggacaactcaaaagaactgtgtggatttagaattagatgttaacattcacactttcctggatactctaaactccggttgcccatcacagtctgattgctatacaccttactacttaataagctcatgttctactggttttttggagcactaataaggttgtgtctgtagtctaaatggacaaagatcttgttctgctggccaattcaaagaaagttgtttggaccacagataaggttttggaagtggaccagggttggaattccacaggaggatataaattacatgggctttgctgttttcagaccaagatctcaataaataaataaataaataaataaataaataaataaataaacagaaaaaccacccatctgcaatctcattctgccacagatactttctccagtattctgttatgcataaagcatggaccctgaaatgcctcccccggtgtatgttgtagtaacaaaacagtcctgcatgttccatgaaaatatccatccttgcctccactcttctttctctaacactgcatataaaacatcagctatatcctgacacaaagtctacatggaaccaaacatgagcatggattctaactaaaatcttgttagcgtcataaatcatgcatgtctttattatcaaagcagaggcagccctcttgaagttttcttttcactaagctggaagcttgccagttttacttaggtcatgaggggtgtggaaaactgcctagtaatcctcctatatataaataccttgcttatttgagaactccaagaaccccattgaatttgaaagaatcaaagtactaaggagctgtcccagcaacatgaggtaaagactttctgtgctttgctcaactgatttctgcatatgttgacattctaaaatgtagagcctttaatgactggttcctaggtttgcttcctcctaacggaggagtcatcctgctctgataggtctcagtctccccactggggagggttttgggtaagaggctaacaacagtgatagcatgataaacataggccttgagtgacatgggaagggagattcagtagatctggaatggtccttacctgtagctctcagaaggggcttcttgagagccttggtggagaactcaaccaccattaatttaaaggccagcttgctggaagctcacaaaagagtatcaagaccttgccctttcccagcaccccagtttctgagtggtgcaatcaagtgactgaagccacaagaaagggaaaacatcaagaggatatagataaagaagtccatggggtcagctttcccatgtgtgggagacaaagaaggaacggaagcagtccagaaagatgaggtgaatttcccacctgtggcagcctgcttggtaaaggcagcattgctcttaaggggataaataagaaggcctttcttattccaaaggagattccacttttcaggacgttttaccacagtgacaattttccaaggggacaactacagactgtccatgaacggacagagacctgagatggagcgaagactggcaatggacagatgagaatggtgactttagagcagcggggaaagaacaggaagcaggttttcatttgataagttggttgaatccaggtagaaagaagaagctaattttaaaggtggatattttttgttgtttttattgatagccaatcagaagatatagacatagatacagatatgtgtatgtatattgtatatatgtgtttgcctgcatgagtttatgtgtatgacattccttagggtgcccatagaggccagagggcatcagagtccctggaactgagttacgggcacttgtgatgtaaccacctgatgtaggtgctggtaactgaaccaggtcctcagtgagagcaacaagtgttattaattactgaaccatctctctagtcccctaggtcagggttttaggattacaataaaactgtgagagtgttgttactttaaaatttgttttttcactacagcggccatgctcagattaagcttatatgactacaagtgtcagtatcagctgggtacttactggaaacaccagtaagtacttacccagaaactaccccagaagtggtcactcagaaactctggagtgggctaagcaatctggatatctgagatgtctgcatatctgggatgtccagtgtccaactgaaacaccagactcaaggcctgaaaaatcagaatcttcagctttggatgctcttgttctaggaaaatgcacccctctcttttctggtttggttagaattagtaaaccacaggaaatattttcactctaaaagattctggctatgtttctgatcctatctgatattgcagttgcttgggagagagagaactgtaaaatgggccccttgtcaggattcctcctccagcaaatgtctatacttggcttgagaagaaatagcatattagtgcctgcaaagaaaagaaaataattttagtctaagaatgtagcttggccaaataaaaatatccttggtcccaatggtatagggacagaggtagggtgatggctctgttcatgcattttcactgatcaaaatagctgtgggaaagaagccagcctgacaattttgacaagccccagccaccacatgcaaagcggtacataggtccccacccactcatatagtccttgtagctaaggtagggcgtggctcccacttggactacagagtgtggacacctgtgatgacactctattccatagtcatccaaggaccaaaaccaagagaaaagcaattgatatgtcagtggtaagcaccaaagtaagaaaggaaaacaatcatcttctagcaggagacagaagagcccaggtgagctctttgtgctcttcaaattctgcaggctcaaggagggtagaaacctgctatgctttcacattgcaaactgccctgggatcatttgaagggtagtctctttatttctcattaatgtgctaactaggccagagctcgggtatctgagattgggccacatatctagaaagcatggaggattgtcccacaaacattgtggcagctctagagtaacagatgactgtgtggatatcttccctgggtaggtgtctgttctcatcatcatgggctgtgttgagcagaagtgaagcatttgggtcaaaagttttccctaatgatatctgctttagggaggggcaactttttcaactatcaaagaaatcttttgttctccctagtgctcttacagagagaacatcatagaaagaagaaatattagaacagaatttcttggtcacacacatcccgagttattgtgtttccctctgggaggtgagaaatcatttctatagtcgttgagacggtgattacccattcttcactcagctgcagaatctcctgacctcaggcaccaaatggattataaaagtggggttacattagaccttgtaccatgttaatgttattctggggctgtgtacattcaaatagaaggaaggagggaagaggccccagtaccgtctccactccagcttaggcatttaggaaagccatccacggaaaccatttctggttcttagagttaacccagaagccttccgagaagggggagataaaaagtgaatttacatattggaaataagtagggaatggggtaaggaaccacttctgtgagtccctctcccaacttttttttttcttgaaaggaccagtgcctataccataaagtcctaaggaagcagaacaggtaagtgtcttagtgttaaggttggtactaaactcatattagttaaaaattattttattaattccttaagaatgttgttgatccaattcacccaactcttctatctcctcccagaccacccccccaacttccttacccttcaactttgtgtctttttttttttttaatctaataacccatggactccaatttgtgctgtccatagacttctgggtatggggctgcccataggagcatggtcagtttatcaagagccacccttaaaaaagtaaaaatattgactaaactccagaaaccattgacttctctcaggtcttccagagtgagagctcatgaatcctacccccactcctggttagactgatgtggtgcagatcttgtttgggcaaccacagctgagttcttgacagcggtggtcctgttgtattcagacactattttgcttcaatccttcacaacctttagctctattgtttttacccctcttctgagatacccctgagtaatatagatctcacagttacagctgaacacaccaatgatacttattctttgtgctttgacctgttgtgaatttctatgtcaataactgtccactgtacgaaggaagtaccctgatgaggtctgatagttgggcaaatctatgggttggaagacatgaatttagaggggggctgtaacacccctatggcaactaacaactgtctgtaattctggtgccagaggatttgataatttcttcagactgccttagataccaatgtggtacacatatatacatgcatgcaaaactatcttatgcataaagagaatacattattagaggaaagtttgatatcatgtccatttggcaaaataatagtaggagggccacccccaggacctgtaagttccccagccgtgtgttcttggccagacttgcagtaccaggcatgtgtttcctcctttgaactggacctcagatccaattagaaagtggttatttgttccatagcattctcgtcactatggtatcagtgaccatatcttgccagactggtcattattgaagttcacagggctcacatctgaggaagagtgttgacaactcctgcacccccagtatcctgcacagtatctctcagtactgtgagaagtagtcagtgcgggagaaatctcctggtcagcactgacttgatttctccacattcttatgctgatgtgtggggtgtcttcagcaatagagtcctaccattacgtaatggtggacaatcaagaataatgacaataccctggatcatcttgggggcctctaaaacacctctgaccaacagcaagaagggcagtgttaccctcctcccacagagctatttattttgcaattgatggcatataaatttttctcttgtgtaagaaaatccagtaaacacattctctctctctctctctctctctctctctctctctctctctctctctgtctgtctctctctctctctctctctctctctctctctctctctctctctctctcactgagtgcatttagtattggtgaccaattgggattagatagcctatcaagggcttgtttctggagaaaattttttctttttcccctcagtagccattgactacctgtatttcttcatctagaagtggagacgtgtgaaatttttcccttctctggtaaacatgtcaactgatgtcatcattatgcaagtcacgtttatgcaagcatattgttgagtttgcatgggcacagcaaccttgtcgaaactagaagacatcctctcacagtaggcctcctgatcctctggatcttacactctttcagaccattcttcctcgttgttctctgaaccttaggtatcagaggtatcagaggaactgaagtagaagccatgggggaatgctgcttacaggcttgcccctcacggcttgctcagtctgattgcttatgtaactgtggacaatctacccagggatggcaccaccatgataagctggtccctcccacatcaatgaccaactaaaaaaataccttacacacatgccaatcttaatggaaacattttctcagtccacaatcccacttccttaatggctatagagtgtgtgtgtgtgtgtgtgtgtgtgtgtgtgtgtgtgtgtgtgtgtgtgtgtgtgcgtgtgtgtgtgaagatggtgtaaaactaaccaacacaggagttaaattctactgacatcaatgaaattattattttgcccgaactttagacctttcctaatcaagtattgtaccattaagtgagttgaattttccaaattcttatgtaaagttactccctagaataagagattagataaatacacagagggaataaatactggcagcagagagagatattgagtggagggtgtttggtggcttaattgctggcttgatttttcagtacacagagtgtaaaaggtatcagtaactgaggtctgtttttacagtgaagaatctcagagaaatctcatacaagaaaacctgcttcagctgagttgtcactttacttgggagttggttatagaagatgtggacatgcctgacttagaaatgagaatctctgttaatgagttacctgataccagcaacagcatgcggatgcacaacctgctggcctatgtgaggcacctgaaaggccagcatgaggaagccctgcagagcttgaaagaagcagaagccctgacccagagggagcaactggacaagagaagcctggtgacctggggtaactgtgcctgggtgcattatctcatggacagcttggcagaagcccaggcctacctggacaaggtggagaacacttgcaaggaattttcaagtcccttccgctataggatggagtgtgccgagatggacagtgaggaaggctgggccttgctgaagtgtggaggacagaataatagacgagccatggcctgctttgcaaaggctctgaaagtggagcctgaaaaccctgactacaacaatggctatgctgttgcagcctatcgccaggatttcaatgacaatagtatttctctggaacccctaaggaaagctgtcaggttaaatccagatgatccttatcttaaagttcttcttgccctaaagcttcagaacttgggaaaaccagatgaagcaagaatgtacattgaagaagctcaggccaacacatcctgccaaccctatgtgttcggatatctggccaaattttaccttaaggaaggttttgtagagagagctcttagtctcctatacagggccttgcaggcaagacctttatctgccttcttgcattaccagattgggctttgctataagaagcaaatgatccaaataaaggaagctacaaacatgcaacctagaggtcaggatagagaaatagcagatcaattgatccgtttggctatgcttcactttcaaaagactttggaactgagacccacatatgacacagcttatgttaatctggctgaaatgtacatagaaactggccaatttggaaaggcagaggacaattttcagaaagtgttgagcatgaggaaccttgatgttactattctgcaagatattcatttccgctatggccgcttccaacagttttgtaagagatcagaagacagagctatcacccattatataaagggtctgaaaatagaagtgacttcttcctatgtcagaaacaagcttctcgaggctttgcagaagctggctgaaagacgcattcgccagaatgttcacgttgtggagagcatcagcctccttggatttgtctacaaactgagaggggacatgagtgaggctctgcgatgctatgagaaggccctgagactcactcaagcattgaaccctgagttttgaagcacagctcatcaaatgacttagtaagcattctcagggctcattattctactactcttttgtggctgttgccttaaatatgaggaaccagatgaagcaagttggagaggactccttctctgtattctgcctttctacagccctgtttttgttttgtcttgtttggctggtgtgtttttttgtttgtttgtttttgtttttgttttgttttgatttgttttgttttcttggatctgtgtgtctaagataggagcttccattctcctatcctactttgctgcactcaaggtccatggttgattcctgctgttctagacacccgtgagctgcttttggtgtgcatggcctacaccctcaggcctatagtaccctgatcaaaggacactttactagggaaggcttatttttttatgcttcaggaatctctggccttcagcaatacatgatagcaatttaaatgagcaaggatgaacattcaaaaggagaggaattcaggattcccctacgccattccagtgcacacttccattcccatgggcactacaatagccatagcccgctggtcaacgagctcaaccttataatcagtgcaacttcttatatcaagtttctgatctcagacaattgtggtgaatgtatgtggtccaaatacaatgatatttatttacggctaagaaaactttcaaagtatttggggatgacagagggagggggtagcctctttggaatgtgcaaactaaaaatgacataaatagcttcatgatactgcttagattgttgagagttgtgtgatattacctttttaatttttagcctatagtattcaatgaaatctgctaatatcacaaaattttgagtgtattttgtttgtgacattattatccaaattctatgtttgtatggaatcagaacacacaagaaccaacctacacagggttaggagggtcaaatcaaagaagccttgggaatacagacactactgaatcttaaagaatataggggggaaaggagggtaaaatatcagaaggatgttggaaaaactcataagcaatcataccattaaataattaaaatgcctttagtacatgtaagttaatgtatacatacagagttaaatttcccacttgggctgataacgtcctccctccaccccctggcacaaatgccacagacaaacaaaaatcccaataccaggcataagaaacccccttttgagtggtttgtcagagttgtctaaaagattcccaaacattgtaaggctgtagcggctgctcttgattgtcccctgaaagtgcatgctgaagacaccatgcaccttggacttagggcccaacagacccaaggcaggtctgacaggaaagcctcctataggaggtctagctttcatggtatcagaaggtgctgtgcaggttaccaaaggagggaagcaatcggtagtactactaagctatgatactcacaaaccacaacaacaaccagtatggcactaagattgtcctaaggatgcaatagtgacacatataccttggtggtaaccaatagttctctaattgaacataagacttgctcaacaagaggaaagtcatgcttggttctagaaacctatccaactgccaagaaaagtgaagtcatgaatcttagaagagactcacaactgccactttactaaaccagcctaatccataaaccagtatcctttacccatttattccctcatccagacaattctctttgtcacagacagagaaaaccgcaatcaatgtaaatgcagttatcaagccaagtcccaacatatacttctatatcacaactgaggctcagggatccctgcagaagagagggtagaaaacacctaaaaggcgaagggacaggaagtttggtgtgagattgtgtctcctataaatgtcagagacactatgcttataaagtctcaccacatgcacctgcctaaacatgaacatgagctgaacaaggacaccactaggcacgctgatgtggaagtgggaacgcttaggaggcccaaatcctaggcaactagaaacattgagaatgccttctccaggaagagctcgtcaattgcatatccaataccaaatggtcagcactgaaaacttacacttatatgtaatattatacagactgagtacacacacacacacacacacacacacacacacacacacacacacacacacacacacactcacacacacacacacactcacacacacacgcacacacagtgagggggtaggaaatggagtgagggaaggagggggtaagagagatagacagagcaagagagactttacccctccccccaaaaaagcagactcgcagtaaacctggtaaaaagaactctcaagctgaactctgctgcccttttaattcaatgctaaccaaacaaaatggctgttattgtatgctatggatttgaaatagtttgctgtatcttgataaataattgatagatgatgtctaccatctgccaatatgtgtgccaatatgtgctgtggggacatgacaattactgttgtgtcttcttcagctacaggaatgtcatactaagaaagaaactagaggtaatagtaattggaaccctgtactctcagatgtgcactctcaccttctgaaatcgtgcttgcttttaagtcatttctaggcgttttcaatgagaaaagtttaggggctattagcaattgttactaggtaacaattgagccagcacagtccctttcatacacactcctatgtcttgcttgctgaggctgttctaacttccctctgccatcttataatactgatgatctgttgtgtttctgagtgacatgtgccattttatatagcatttcattagaattatgaactaaaccatgacaaatgaggtacttgacaagggaatccttggcctctgggtaaatttatcattctgctattgtcccttatattagactctcattttaaattaaagaatgattgatttgcaattaaaattatatgtatatgctgtagcatggccttctgaaacacatacaagttgtggaatggctgcatcatccattactataaaacaccttgagtacttattttttatagtaataactctcaaaatctactctttcaaatgttttcagtattattgtcatctttatgtgtttcattgtcatccctctgtaattaattttttttaagataggttcttattgtattgttcaggctgagctaaaacataccatgcagtctaggttggcctggaactgtccatttccctggggaagtgtgtttccatacatacctggatgattactctttagatatagaattttggaagtctcaaaatgtctatagggaacaagttttttgatatgtgtattttttatctaccagaaggctgctttgtatgggatttttgcacagttctggattcagagaaacagattcgtatatgatcttgacatcctcaccacttacatagatcctaaaatgtttccaattactaaactaactagtaacttatttcagaattacagtttttttttctggaatttagttcctcatctgggggaaagaaatttattcaaataacaatctcatttatatgttatttctttttcgtgtgtaacatggggctataaattatactcataactgttgctggatttcctgcctggttctgcagccccttgccccaaataagcacacagagacactatattaattatgaaaccataggccgatggctaggggttcttattggctagctctgtcttaattgctaactcatttctataaatctatgtatttccacatggtcttggcttaccagatacctgtatctcctttggtggtaacatgtcatctgcttttggcagctctctccacctacctttcccagaattctcatctcctagtcccacttatcttcttgtcttattggccaaacagtgttttattcatcatccaataagagaaacatatatacagaaggacattccccatcacataaacgaattaaaaagagactccagagctgagcatgggtccgcatacctgaaatcccagaacaagcaaggctgaagccagaaaatggtgaatacaagacaagctttggctagacagcaaattccaggccaacctgggctactcagggaaaccatgtctgaaaacagtagtatcatgacagtctgcaaaggaagagtaaggggagttgggagatgcttctgatggctgagtgaaatgaaactctcagtaccagatactgacaagtttgaatgacccagtgctacctcaacagaactaatcctgtgagtctagtatcagtgcccacacacaccaatggggggacattcactagggtatctctgggtccgctaaaatgtggccaaagaatcatctgctcacatgcacagacctctgctgaatcttgactggaaggagagtggcagctcctaactatgctgattatagatggatttggcccagtgtccagacagatcttcaaaaagatgtgctttgggcagcatgttatgtgttcacaattttacatcatcctagcggaagaaaaactgttaaaaagtctttaaattttcacacatgtagataatatgttttggtcatacctatccccagcacctccctctctatactcctgatactcctcaacatgttttcccttctgacttcttgtcctctctctttcttaaataactgccacccactcctcagaaaggggtgcagctctcataagccacccccagtattcaccaaagaaactttggtacttaacattactgtcttcattccctgtcccctaccaccaccacacacacacacacacacacacacacacacacacacacacacacacacacacacacacaattgtccatattctgagttgaaacttagatttattatagcattccagtttgtcatacatagttaccataggatcattgtcaggaacacaaacaaactcaaggtggaataaaaaaaaaaataaggagcaaaaaatattctagggttaggccaaagctaacctttcaggttaggatggttacactgaaagggaatgaagaaataaaactaatttttgctggcagttgtcatgcattacagaacaaaaatagtgatcaaaaagtgctatgtgagcctggagtcctgtttccctgggtgactcatgggaagacctgttggctggaaaattatacagctaggatggacaggggagtcaggaagagaaaacggttctttaagggtgtttgataacataattaagcaagggaatcctgtggagcaacacttgacaggagggctcctgcctctccacacccagtaggcaccattccacagcacacttctgttgcagtgcagacttgagcgcctgcaccatggcacacttcctgttatcctcaggctcagatgccgtcaaggaaaggctgcctgtgccccaaagagtgtcccgccccccccactcactcagcttctgacttattccccagagagaccaagaatccagcacattttgccactgaatgttttcatctttggcctatgcttgctccttcatcccttccttctcaatggatgctgtttctgtgagactgcaggacttgagtaactccttcagggcagcaaggccttcagaccgctggtgatattcctggaggttgcaatagctctggtagagctgttgttcttcagcactggggctctccttgccgaagaccaactgacagcatcgttttacttctgggtaatcgatgaggtctgagtaggagttcagacgactttgcttcctctgaagagcctggcgcatgtactccatggttaattgtctcagttcttccatcttctctaggctgtcactggagccagcatttccggttttctgtaattgcttcagcctttccctgtaacggcacatgaccaggctgtagaggggagtcttgttttctgtggatcttagtgctcttacaagaagtgtgttagctctatctaggttaccctttttctggtaaaactgggatgccttttgcagtacatccgcttgatcaggagcttttctcagggcgtcgtcaatcagtcgctctccttcagcttcttctcccattttctgcagtttcagggccaagagaactttgacatactggttctcagcgttcagctccatggcctgcttcagagcatccacagcgaactgcttctcgggctgttcttctagacggcttgtggcgattgccagcccagacgaacactctggatcactgggcttctcttctagagcctttaggaagcacattttagctctttcattccttccacactttaggcgtgtccatccctcctcacagtcaagttctggacattccacgctgtaaggatttgcatacttctcgcacacgtgtctcaccttgtcaacataagcctgagcttctgagagccggcccatgtggtagtagatccaagcatagtttccccaggtgaccagatgtctaatttctgcttgatcatcctgctttggctccactgagacttcagcttgccttaagcactccaaggctgcctccttttcaccatccaggtattttatataggccaacaagttgaacattgtcgctttgtgctcagagtttaaaatgtcaatctggtttcgcactctgtcttccacatgacttgagagacttccttcccagaacaagttccaggtgaaatggcatttcagctgtggaagaattttttccagagagttcctggtgacctcactgtggagaaaacacacatggtcactttgatcatcttgtgcatcctttgatggttcattttacatgatagcttgactgagccccaggagactgaaaaatgaactatcttcttgtggatgttggactcagagtacagtgtgagccatgggctccaggctggatttgctttcttgctattcttcccaattaccagtttctcaaacacccattaaatattcaagatttgtttctgtccataccctttctgctcctcccacaagccacctctttctgttgtccctgtgcacagtttcacacacctgactcaagcggcattttttacagtgaaggaatgggagacttagtggtgaatactgcatcttcacatttcagtgtacatatgcacaaacttgtggccgttttaaaatagccccatcccttggccctctcctcttagccttatctcagatctactctttcaatcatttagaaattcctgaaatttgcattttaatcacaccaaagtcaattatgattcagagcacaagcatagtgcaatttcagtgacagtaatactttatctctgtttctacttaacagggtagaggaaacctagcgggtcactaagagaatggtcctgagagcttgctccccaattatgataaaacaaaatccaaagccgagtgtggcaatgtacactttcaatcccagtactcggaaggaaaaagcaggctgatctctgtcagtttgaggccagccagggtgaaaaaattagactctgtctcaacaacaacaaaacataagataaagtaaaataaaaaaaataaattcaagttctaagtgtcctaatcacatactggagttttagattacagaattaaaaaggaacacacttgatgaaaagtcaggatgctgataagataaccacaaaacagaaatccacaaattctggtttagtcttttttaaatataagaaattatggtggaactggaacctcaggggctgactcttagttctcagatttcatgggccagattgttcttaaagaggcttaaagacactcatgtatcttcaaggccttccctgcctttggttctcaactgcttttctagttcctcgtattaactgccaagatgaaagatgctgtgagttttcactgtcaataggttgagattcgtaattacaatagaaacacacctttgggtatgtctagaaagatgtttctggaaagatttaattgggcaatgaaaactgatcctagtgtgggaggcatgaccctactggccagggtccaagactaaatacaaaaagagagaacaagctgggggccagcagtctagtatctctgcttcctgactgaacacagtgccaccagcttatgctgttgctgccatgacttctagccaagactgcaccctcaaactgtgagtcaaagtaaccctttgtttcctaaagccattttcatcaggtcttttgtcccagtacaccaagcaaagtaactaatacagagacacaggcataatatccaaattggtgagacaggtcatgagaaaattgagcaaatgaacatttaatctctgcatactgaaagaccctaacgaggacatctgtgcatagaacaagagcttttcatgagactttgcctcctacacagtctacacagaaggtactatgtacctttccaggtcctttatttgtcccattttgtgatgtttatcctgacaggaaagagcagctcaagctgcctcagtcctcacagaatgccatgatgtagactcccgaccagcatagtctaaagggttctcctcagaccttcttagattggtgactctggacatacccaaacacgaaacacagcaaagcctcttgttcaggctagccaccgaggttctaggcaggtcttggctttctggtcaaccatattcaccactaacaccagtcttctcccagggccattatataggaaggaggaacccagagtagttggaattcaaatcccaactctgaccttgctaaatatttgtaacccttgggtctgagggcagggatgactgtcttgttttgttctctctcagagtaattaatagcatctgtcttccctgggccattgataccacaatcattccctgataggaaattggtgggaaaggtaccatttcttcttaattctctctgaggctctcccaatgacagactctcagcaggtgtagttacatttaagaaaaaaacatttactatgatttttctttacttaccgtagaatcacttattttaagggtatagttttctgagtctcaacaaatgtttatgcctatggacccacctagagtccttataggctacttctgacattccatattctatccctattgcctttagacactcactgttctattttccataactagaaattaggcttcctagcagcatttcacagtagtaaaatgaaactttaaacattgagacttggtttcatgtaagaattgaagaaaacaaaacaaaacaaaacaaaacaaaacaaaacaaaaaccctgtttatctctaaaaatcattttctctaccttgaccctgaagtgatcaaagatttcagcaacttgacctgagtttgcagtactgatcccagctctcacactacctgctggaaaaagaatgcttcctttcctacccccccccccacgcctccacacacagagagatcccagtgacttgttccctttaaataatgcaagagcaaagtcccgttagagcaattccattagtactagctttgagtcaaattttgagcctgagtggatcaaaccatgcctgtaaaacctctcttaactcaggaattagcgccatccagcgagcagctttagaagctgcaggatcttgcccaagcctacagagaaacaaaaatcaaaggaaaactcaacaaaagccatgcaaatttagttgtgtggaatctgtaagctgccagacaacttaagagacttccaggcagaaagcagctccatgcatcatctacagaggagatcctgagattgcactgacctcatgactgctacctgcttctgtgctgctcggaaaagctggatgtggagtgcacccttcaggaatctcagtcagcatcaggtggatgatcagaggactatataagggggacaggggagcggtggagggaggagtgcaccagctgatgctctcctgtttctaaggacttgtgtttgtgaaagggaagaggaaactggaaagtgaaactgacttaaaatcatcagaagaggaaaaagaaacttaatgccgagatgggttatgacccagccagttagtttcccagcttttccagcctagagcagcaccaagcaaagactcactggcaaagctagcttgacacatagagtttatgaagacagagtcccatgagatagttagagttcaaagtcagacattgctgctgtgtagcaggaagatgacatgaacatagatagctgtgaaattctgattggttgttttacttagcaacttgctgctattaatggtacaagaggttaagtgcaatcctgtcagctccactacatttgcccaaagactatgctttgaaaggcttcagttagcaaaggcactaaaagtataacattttcaagaatcatatttagttcttttattcagaactcaatgcctgattttgacctagagatttctccctctctctcttgaatgcacagaagccatgagaggacattatgtaccctggaactagagttaaaggcagctgagctgctcagcttgcgtgctgggaactaaactcaggtcctctgtaagagcagcaagtcttcttggctgctgagacatatctctccagccctacggagaaccttacataagaaatattttctactattgtaggatgacttctccatattcttgattcttgttttactctagttcctggctcatgaagtacacttgattttgccatatattagtaacaattgcatgtggcaactagaaaatataatttgacattaatcattttccctatcagtggaaaaaaaacattgaaatttactatagtaaactaagaacctcccctttaagaaatgtgcaaaactaatcaaactgatcaaacatttaaagtcaaagatatctgtgagaatcttgcctcagcttaggcatcttctcagccctcaggtggctgtactttcttgtcatttcatgttatatgtccacagtcacgtgtttaacagaagatgagtcacctgatacatgttcataggttaggcattttcatggcatcttcaatcttgttacagaaggctggctcatctcttcaacatcataccataaacacaatttcaagcacttggcattgcttcagaaatggttgcagtcaatagaagaagccatccaattacttatcttacacatataaataacttatcagggcgtagttaagatctatctttctcaatcaagcacctgaggggcatgaattctcctcccctcggtactgttttctgaactaaatggaagaaaacagccttttcatttaaggcccctgtcactctatgaaaaaaagtcacagcatgaagtcatgaacgaaccataaccaacagataatcttcgagatagcaggcacaaagcctaaacctctgaaactatgtgagccaccctaattaaatgttttactttctaagagtagccatggtcatggtgtctcttcacaggaacagaaaccctgactaagacaggaaccaacgtaagtgtccatcaatgtatgaatggataaagaaaatatagtgtgaaatatatatatatatatatatatatatatatataatcattacacacatgtgcatgcacaatggaacaatgggatacacaagcacacacatgtacatacaaagtggaatacacaggcacacacacacatacccacacacatacccacacaatggaatactacccagtctttaaaaggcagagattctgagatttttcagcaatgtggatatgtctggagaatgtcatggaaagtgaaacagcctggacacagagaaaatattcatgtgtatgaagaataaaaaaaatgaactcaagaatcagagtgcagagagctataaccagattgtgatggggttagggactagaggccatgagtctgaagatacacaattttagtttttattctttttatttaaatgaactgtatgttttaattaaagatttacttttattgccaggcaaatgatagtgcatgtctttaatcccaacactcgggaggcagagtcaggcagatctctgtgagttcgagaccaatctggtctacagagtgagttccaggacaggttccaaagctacagaaaaaccctgtctcaaaaaaccaaaaaaaaatcacttttattatttttaagtgtgtgtgtgtgtgtgtgtgtgtatgtgtgtgtgtgtgtccacaagtgcatgtgtattcttagaggccagaaaagggcaacagattccctggaggcagaattgcaggcagttgtgagtcacctgctttgggtgctggaaactgtatctcgatcctctgtaagagcaacaaacaatttctgaatcattcctccatcccattatttaagacagaggttgctggaagccaagcagagaggcttcctaagtgctcttgattagattgtcatctgtgcaaacagttgagagcttcatgcagcagtctacaaggatctcaggaattcccatcttcaggatggaatgggatttccattaaaaagatccatccattcagaaatgacacaaactcaggcatgctccaatttttaaaactgatgcggccataatggaaggaagccttggtgttggtgttccatattgtaggtttcatattgtcctttgtaagactggcccaatgaagaggaaaggcagaattggcatttagattcacaaacctttagtaaaccccattctgatttctaatcttaaatccttgtactaggcacctaagggaaggtgcagtacacaactgagaatgccttatacctgctgcacttaggtgcatctaagaatctcagtttttctctgtatctcccccccacatccaatacaaagtgaagattatcaacatttaggcagccacactgtaaatcataaggaaaacttatttgctaagtctaattcccttctctgaaataggtgatggggtagtgttgtgagaaaagaagacccaggttctgtagtctttagttggatctaccattcctagttagtgtcaagctgatggtatccatgggaggtgatgctaaaataagtctcactgggactgtaacactctcatgtcctctgctctcactgggtgagtatggtgtgagtctactggcatgatctgatatggtttggatctggaatgttccacaaaggctcccacggtgagaggtctggagggctctgacagttcagtccactgatggtttcctaatttgatggcctcactggaaagtgatggaaatttgtgaagtaggtcactgaacacatgtactttggcatgatactttgtctcaaggcattctttgcttcactcttgccttcctggcctccacaacgtgagtgctctcttcagcatgccccttttctgcctcaatcccagaaaacacaaagccaacaaatcatttctaaacctctgaaacaaccaaccagaataaagctccctgttcttattatttctctctggtatttgtcacagcaagtgaaaactgttgggggtgggggatgtgaaagcaatcatgactcagtctgctgttcagggactgcctctgagcctaaaggagaaagagggctacaagaagaagctgggaggggcttttccccaagggaagttatgatttgaaagcaagctggagatgagagaagtcttctctctccttcactcacacaaacacacctgagactctgacatactctcagagtaccaacctagtacaaggaccggaaacatacagaagcagttttgtggtcaaataatgttgatgtgtagggtttggagcaagacaaacagcagatagagtcccatcattttccaggctcgtttgtcagcacttagagcagcttcatcagagactcaccacttacctcgagtatatgcaaaaagatgtgagaaaagtggccagatcacctctcctgactgatgctgaagactgaaataggaagccaagggacgcaaggcaggagggcacacaagtgccaactgcaatgccaggtttgctttcactgttacagcttctttgataacaggaacaagtttgcatttcagcatggaagcctattcacagcccagcatcttcaaggtcacacaaagcacaatggtgctattttccttcagaaaatatctgaggccagggaacgtcatttgacccaactattctctagaaactgtggaagactgcaggcatctctatgttcctttccaagttggttggcactccagatttccttcttaagaaatagcaagatcagatgttttcctgtctgtctcatcaatttgttacaaccccttacagccttagggagaggaatgccactccctgaagatgtggtcaaactatgtcctaaaatctgtctagggtctctggttgggttcttgccttgaactcctgtatggatttccctcaacatggactgtaagttattagccaaataagcccttcaagttggtttgcttgtgttttgaaacaacaacaggagtgcaagcaaggataaaagtcaagacagagtgtgtccctgtgtactggatgcatagtatcagacatctaatataaaaagaacagacagacactcaaggctgcgaaaaaaattttgctactctttcttgtcatacttgagtctaagacagtgagagtacagtaaaatttttattgaaccagagcactgcttaatgttctacctcatgttatttatgaacaaagctgagtatttttccagaaattcaaatgctaaaaactgatggacttaaatgcatacaaaattttttaacatttaaaataacatggaacattgttccagtggtcagaatgttcattttaacagtctacaaatctaatatatttgaattgctgaataaaatgttcctatttacataaaggcaaactaatcctaatagagaaacattttccactccagagggtgactgagagcctcatactgggctcattgactcgatgctgcttcacaccaaccctaaagtttattccattcaaggattacctaggaaatgtcaattgtcaattttgtgatgttcctgagtattttttcagagttccaagaagtctttatgtctcttactatgcaatatttataatggaggaaaaacttcaccctccaatacccattccattttctaagtccttccaccaggccgtcagtcaccaagttattctcccatccggtggccttcctagtgtctgtcatatgggttcatcatagctttttgataaaggaagtattcatttgactaatagtgactataaactttgtcctcgtgggtttaaaattgtcaagggtaaatcagcattctctttgtctcacaggagtttccacacaagtttggaataaatatttatgtcatttgtcactatggtagacagaatgccccttatttgcatggagcatcatactcacaggcagagcagagtcggggagaagtccccccgtgtgcctcatggaagtctggcattgactctcctgctttacacagatatgtcctgcccttctaactttctctggtctcagtttttccagttatattgccatctgagttaatggaacaattgaactcatgtttatgggacactgtagattgaggactggctgggaaattggagggaggattgatttggtccctcagcttttgttatggtttgtttgtttttagacctggaactcactattgagtttctattttgagctcaattaatattgagcactattttgtaaatttcaaaattatgcagtaaaacaaaatcactaccttctgggttttataaacatatgatgatagtggttatatgggcatatacataaccaaacaaacaagcaacatacataatcattaaacatttacatgtctaattctcaacacccttcaccccctttccaggtcatgctcaggctgacctctaactcactgtaatcctcctgtctcagctgccaagtgctgggattattgtcctgagccactgctcagttttttgatggacactgttattatgtagaacaaggctgtgccatatcagcaataactcaaggatggaaactcacccataggaggaatttgagtgctttacataaatacagaaacaaacccaagacaacaaatccacagagggggattgaaaatttgctaccatggaaactatctctaagaaatagaaagagatctagactgtttgccaggcctctgtatctgtgcctccaactggcctctttctgagacccctacgtgatccagagatttaggtgccaacatctgatcacagggttcccagcaaccctgataaatactacagtcagcctgttaggacatgcttattccatgaagttgttaagtattccgaatggctacttggtaagggtttctagtttccttccagcagtagcctcgtgggcaccaggttactacacttcattccccccctcatgcaaagacgctgaaaaaacaggcctctcagagtcctgtcccctctcagagtctttagcagcttgctggctttctttattcaactcccgaagaaacgccaagatgtgcaaggccttggagtcaaatccattttgagaacgtctcctttcagcaatcaatctaagtttgtttgtcatcttttctttaggcttcgtcttctgccttattttcacaccctcaagatactggtggatggccttgtcttcacacttcatttgaaaaaactgaaaattgccataccgtaggtggagcaactgtttaaggccaggagtgagttccttcttgaatcctttctggaagtaataatcggcttctttgtactgctctgccaggacataaagttgagcaaggtagctacaggaatctttgatcatctccttggtctcttctgctttctttaagtaataaattgcttgtttcagtaactgctctctattctcattctgtgaagtttctcttctggaatctatttgaaggacttttgacctatagaaacacccaatatagtaatacacataggcattgttgggtaggagttctaaagcctggctaagcaactgtatagctctgtctttatcatgtgtcttataataaaacctggctgcacttcgaagtacatctgtctcacctggggcttcccttaaggcttcttcaaccagttcctttccctggttttcctgattcatctcaagtttcagggccaagagtactttaacataagggctgttgggagacattctaatggcttgcttcagagagtcgacggcattctgctgtgctggccagaagtctagacggtagtttgagatggcccagccgctggtgaattctgggttcttcggttccttttccagagccttttcaaaacataccttcactctctcattttggtttcgggtacacttcagtcgggcccacccttcctcacagtccagctcaggactctcaatcctgtagggactggaaaacttctcacagacctgtctcaccttgtcaagataagcctgagctttttcgagttggcccatgtgatagtaaacccaagcatagtttccccaggtgactatacttctgatttctacgtggtcaggatgctgttgctggatgaactgttcagctttctctaactctttcagcgctgacacgttttggcctctgcggtgctttacaaacgccaatatgttgcacattgtggctttacactcactgttctgaaactcatccttgttaaacaccttgtcctcaaactcatccaatgactcgtctcctgccatcaagttccaggtgaaatggcattttagctgctgtagcttgctctccaaggatttcttagtggttgtgctgtgggacagaaaaaaataaagaaacagtcatctgaggacatcccacattcgcctggcaaggagtaggatcacagcaaatattcttgtccttcttaacagtcttaatctaaacctcaccaagggacacactttcctttcttccaatatttggcacatgtcaaaattactgcatagggaagcaagagtttgctcatttgggcagcagaattgacagaaggaagtgagtcagtcctagatgcagttagggtttcctagagagactgtctatatttcctagctcttgcctttgctttggagggtctttgaactccagcacagctccagtattgctaatgaaggtttttgtaaattaagaaatagtaatttaatcacttctttactcttaacctctaacataccattaagatttaaaaatcttagctatgtttgtatgctattgagatttcattgtgctgagtctaaattctttgttatcttagaaattcaaatccactttagctccttcatttcccttttaaaagttaattgctttctatttcctattattcaaactttgaagatttttttaaatgattttatttatttattatgtatgcaacattctgcttccatgtatatctgcacaccagaagagggcaccagatctcataacggatgtttgtgagccaccatgtggttgctgggaattgaactcaggatttctagaagagcagtcagtgctcttaacccctgagacatcactccagcccttaatgcctattttctgtcttctcctgatcctggtcccatttctattttcctgatatacattcacataaaaatatataaagctaagatttacaaatgagagagaacatgcaatgtttgatgcttgctgttttgaatctggattttctttctttttcctttttttgtcttttcgattttttgagacagggtttctctgcattgctttggagcctgtcctggaactcactctgtagaccagactggctttgaactcacagagatccacccgcctctgcttcctgagtgctgggattaaaggcaggcaccaccaacacctggctgtaggtctggattttcttacttattatggtattttctagttccatccattttcctgcaaattgcatgatttcattttgttctctctcccttttttaaaaagatttatttatttattatgtgtaaagtgttcggcctgcatgtatgcctgcaggccagaggagggcttattacagatgtttgtgagccaccatgtggttgcagggaattgaactcaggatctctggaagagcaagcagtgctcttaacctctgagccatctctccaggcccctattttgttctcttagaaatacatttgaattaaaatataactcatcgcttccctctatccctccagctcttcatgtgtctcctcccttcggtcctctccaattaatagcctctttttctttgagtatcgttacatatttctgtatatatatatatacaaaacatatttacaaatctataaatacagtctgtgagtccatcttttgttgtgtgtgtgtgtgtggtttgggggctgaacactaagcaaccagtcagatagctcatccctgggagaggctaatcctttacttattcttttatggctgaataaaaattccatggtatgtaccacatcttcattattccttcatcattgttggacttgtagactgagtccatttccttgttttgtgaggaaaaaacatgtttatttgaaacacacatggacaatctgaaataatcctaaagtcttttgagcatctgctcattttatctgtttgcatcttactttcagtcattatggattttaccatcattgcaacatttcctctattaattgcattatatatgtgagcaacacctcaaactttcatttcaggtgaaattcttgcattgatgctgtctcactcaggtgacttattaatacatctatttatttaattttggttttcaagacaggttttctctgtggctttggaggctgtcctggaactagctcttgtagaccagtctggtctcaaactcacagagatccacctgcctgtgcctcccgagtgctgggattaaagccatgtgccaccaacacctggctttttaaaattattattaatactttcatattattattttaatttcctctctttgactttttaccttacatcttgcaaccacccacattttttgttgggccagagttagggttaccagaaatgaaatagatctgaaaggcagtgagtgagacaagctccttccttcttgtctgtgctgtgtttagttagcaagcttcatgtatttctgagattaattcagcaactacaagtaaaattcagatgtgcaggaagcagggttagtagtctaagtatgtctttaacaataaagtaatctaaaaagatcaattcccttaaataatatttgtattagatttacccaatttaattttgcaaccagaaggagacacacacacacacacacacacacacacacacacacacacacagagagagagagagagagagagagagagagagagagagagagagagagagagagagagaaagaattgacaagagcaattcttctggatctttacaggaagtccctgctagatcaaacagctgtctctgacctcagttctcagctgccagctaagcagatctggaggaagcaactgagcatctatctctatgacatacttacagctatagggacagaggtgggcaaggcaataaacaaacacagaaacacgactagcctctcgtgggactgtggctgcttaggatttgcagccatcagcagggctgacctcctcaccaccagagcaagggaagacatacctcatggttgctgtgtaactcccagcagtgttgaagggctcagtgcaggctgcagctcgctccaggcaatctcgtcctcagacttctaatgaagtgctactgacccatatataacagtggctgctggtttctcttcctgtttcttggcagctgaccccacagaagagaaattgaaaccagaaagtaaaactgatgtcactttttatgaacaaattagttgaaaaagagccaacccctctcagtgtccaactttgtgctgtgaatcagaagtattgatgtcttagatttgcaacacagaggatattcaacctggagaaggaaacctttacctcagcatcctgccctatgttgccactatagcctatcctcactctcatcacccttatggctcacaggccactgcaaggagcattttctactccctgggcagggatttttctctgactcatttactaagctgaaggttccttccttcagtgacaggtgcacactccatagcgtggcagggattctaaatgcagatgttggatgactggacacacaatgtccaacttgggatccgatacccatccctctgcatttctatgctgtggctctctgtttgtctctgctttagtttctcctgttctgaattgggaaccctactgctaccaaatcatcatgatgatgggagggttagggggggtgaatgtatgaaatgctctagaatcatgcctggcacctagtaactagtgtgactagtaacccaaatcattgatcagaatccataagcacaaactttagatctttgctttttccagagcctgaaatggtctgacagtcatgacttgccgtggtcactgacaatcccgaggcaaataatccttaagacatcttatatatacctggcttccttgggacctgtcttttggggcagcttgtcagtcagcagttgcttcttgctctctttgagattgctcaccaggactgctcttgacaaaggcactccctccatctcctatgtcctgaccttctgaactgtgaggaaataaattctatccattatgcattatccagtgtatgccatgatgatattaaagaaaacgggagtgaggaccttctttttcaaagtttaaaaacgtgtgtgtgtttctgggtatgcctgtgcgtgtgtgagtgccagtggagcccaggaaagggctctggtcttcctggagccagcattacagttggttgattggttgttagacacctgatgtaagtgttagggacagaatactggttctctgtaatagcaggaagcacttttaaccactgagccatttctccatccactaaggaattccctcaacataaaatttgagattcctgaagggccagtagtctttgactgggaacttgatacaataaaatggcttctctacagttccaagcagaagataaacttacaaataaggttacattgggaagattgacctctattcctgatagaacatcaagagtatttgtttctttcattcattaagaattcattcatatcatcagtaaatgtttactgagtacaatgtactaggcactttgaaattgcattctaggctcttggattgcatccgtgtacttcatggatcttacaacctgacagacaagacaagacaacacacaggactgttgcagaataatttacgtctctcttctctcttgactttttagcccctggtggtatgcaagggggtacaataaaggaactgatgacatgaccacttattggtagggttaaggtttttattatagatatgagggagagaaagagagcacagataaagatatctggaagaatctaaagcagagagagagagaaggacaaagactgcccatggccagcactagggaaatgggagagcaggaattaatagaggagatatccagatataacacagcaaatgaaccaagagggagtaagggaataagagagaataagtagataaatagaaatacagatagatagatagatagatagatagatagatagatagatagatagagcaagaatagtaagagcagagaataatgggaatcccatgttataagaaggatgaacagccaacaggagggaaccctgtaatctggaagggatttagagaagaagaggaggtgagaagggctaggatgtcagcatggacattgaaatatataacaggtactgtgatactgacggagcttagaggccagcaggggctgatggtgccatgggcagccctatgtccctcctgccaggtgagggaaatgactccttttagcagataggaactggtttcacaagttcctgaggaattctgtattttatctaaccaccagaaaccctccaatagtacaggttgagctcatttcttttttaatttttttaattttaattctttaattgctactcatatttacaaatccatcccccctccccatccatttctcgatagatgaaccaccttttagaccttagggaattggagcttcctttggacctgacaccgatgtaactacgtttgaaatagaacctttaagtaagtgagattagatgaagtaatgacatcaaaggataaactataatcaagaaaacaagtcattacaacaaacataacaaggatcattttatttccatagttcaaaatctgtactggttaagaaaattgtaatgtaaacaggtagtttaaaatctaatgaataatgatgtttaaaatctaatgaacaaaaatgaaatgaaagaaatgcctattgcatgaacaatgtttcaatttttagagtttttagaaaacatgtcactgtatagttttaagtagcatgaacaatgtttcaatgctacttaaaactatacagtgacatgttttctaaaaactcagtgatctcaggtatgtggcaaatgagggactttcataagagagttcctggaggatttgtgatacagaccttgtagggcaaggtggtgagacagggtaggggcttttgacataaaaatttgtgagccttaggaatttttacgggtgtgtgtgtgtgtgtgtgtgtgtgtgtgtgtgtgtgatgtaaaatggtccactggagggagacaccataaccatgcctcataagggctggctcagggtgtgcctgaagacactagtcagggggtggtcaaggtgatgtcagggtgacatgggagaagtttaaagagttaggcaactcacatggtagccccctctcttccttgctgcttcagcttgctctgctttcctgctggttggctagtgatctctgtaagtaaggattttacctaataaatatatactgagcatgtcatgactacttattggaaattaacatcattaggtccctttttcaggaagtcactatataatgtaagttaaaatttgaactcacattccttctgccttaacatctggagggctgggattacatgcatgcaccaccatgcccagcttctgctagttttttgatatctcaacatggttagggaatagttttcagttattcatgcaaacattaatgttagtgttatccagtctgtgtgtgttcatgtgtgtgtacctctgtgggtgcatgcatatgtgcacagttatgcaggtatgtacgtatgtgtatgttggaaatctttgtgttaggaaatcagcatataatgactaaaattacaagaacaggaaccatcaatgtactcacattattgaaaagcatagtgataaggaacatagagtcaccgagtgagtttttgtagtgaatggagactttgggaagtagggaacagtgttagatggagctgggagtctgctatcgctactatccggaagctgattgtttattgcaattaaataatgaaaacagttgattgagctacaaaataaatacagactagaagagaaaagaaatgaggagtaagggaaagaagaaaacacgagaaagatggagaagaaaagaaaccaggaggtgggtggaagaaagggaaagacagacaaagcaagcggaatgtttacatacaacaactgttaggtccaaagggaaaatccacaaacatccaaagacagcagagtcaatggccttgcccaaatgacagtcttgatcaggctcaagctggactattgctggtggagagactggtagctttccattggaacctgtgaacagggttttctgttgccaaagggacccactttcattatcctttcttgcctgtggcaaaggggatatctgatcctctgctgccatacacctgtggttgtgtatcaaagcccatagtaaccccaggcttctctgatccctaaccttgtaaatactccctgacagaaagtaacctgtatcccctggctgctctctctcacaaggcagttcttccactttaagtcccagtcaagcactcaaaggaaagggaaactaaagagccaggatcatgagaaagcttctcaaaagggcaacacaacctctcttgggcctcacacttctgtagcaccctgcttccaaattaccgccctgctgtgagactgagaggagctatgaaccaaacacaaacactggcacagaaacagaagcccgtttggagtctggatccatgaagttctgagagtaactgaagtgcaaataaaaacagggaacacttagtgatctggtgaaagaaaacgatgtaattaaggccaaataattctagggggcagatgggagataatgaactctcaccagctaaaggtcaatccacagagtgttcccaacagatatgggtaaaaaggaagtcaacattctcaggctttcaatgtcttttagccaggaatagcatcataactaattgttgtagcatgtacctgatttaattgtcctccaaaggctccagtattgaagctcaattttccagctgctgaagctaatttttttaacgttgttgtttttattattaatttatttaaattagaaacaatcttattttatacatcaatctcagttccctctgcctcacatcctcccatgatccccaccaaccctcccacccatcctatcccccttctgctccccagggagggtgaggccttccatggggggttcagaaaaatctgaagctagaatcttaaaggagggcacagtgagaccatcaaaccgaacggctcttgagagaaaaagaaaaatgtactcaaactgcccaagctgtctggagtggagtggggtggggtggggtggggtggggcatcaggaaaatccggtgcgggaaaacacaacaaaaacaatgattataaagagatacaggaaactgggggatgtaggtggaggaagcctgtgaactggaatagcctgaatatttggaattgttggggaggggcttagaagatccctgtggctttggtgttcaccataggtatgtcaatggggaatcagatgactcatcagccagaggcagagggaaactggaaatccttctggcagaaagaaacacttttgacagatctctgggaataaaatctgatctagccatcagcaattcttgttccctatctcccagtcatcctctagcccccagtggttctcaaccttcccgatgcccggaccctttaatacagttcctcatgttgtggtgaccctcaaccgtaaaatcattgctttgctacttcataaactgtaattttgctgcagttatgaatcttagtgcaaataactgatatgcagaatatgtgatgtgaccccccagcatggggtcaacacacaggttgagaaccactgatctagcctgaactgagcccagcatgtcatgttggagatagtcagtgggcctttctgatggcggatgttcttttatatacatgtttctcttactggttgatgaagaaaacactgtttggccaatagaggcaggaagataggtgggattaggagactaggagaattcagggaaaggtaggcagagagagacctcaaagagtcgaagagacgccatgtagccgaggaaggagtaacagtcctggcattctccggtaagccaagaccatgtgaaaatacttaatttatagaaatgggtatacaattaagactgagttagctataagaagtcctaaccatctcccaacagtttaagaattaatataagtctttgtgtgcttatttggggctgtatagaatttggtaggacctggagggacaagaaactccagcaacagcagccattttggggtgcttggggcttttcttcaaacctaacaaaaaagacactggttcatcagagctcttgactaaataataaattcatccagagatggacttataacttgatacacttatttcaaatggctggaaactagtggcattcttagaggaaatgggtctttggagatgaatccttgttcttggcccattctggtcgtttactctgtttcccaaaggccaccaggtaagcagtttccccctgccatgcccttcccttgtgacatttctgtcttgccacaagctaaatgcaatggtgccaggcaacaatggattagaatctctgcaaccatgaatcacataaatcttttcttcattcaggtgtttttctcactttttgttatttatttatttatttatttatttatttatttattgtatccagtgagaataggttggcagttcagattatcctcaaaacaaattcacgtatatgggcaatatagatatatcccttccatgaacaggccttgtgggatactatccagggctgtctgatgtggtttttctgagctgtagttcctttacctcatttgaactccttgacaaccttttaaaaattactccctgtgagtcaagaactattttttgtctttcatttattatgtttattctctgattatgtggtcggcaccttttctttagatgaccaggaatagactacaaagggataggaggcttgcataagattgtaccattgtgagtagaggatctttgtttctcatagtctggctctagaaccaggactgagtgtccaacctttgacatgacattgtcatctacaaagctcatgttccagtgctacacaataaagttacaataaaagaaaaaagaaaatcccaaaaccctaatacatttaaggatacaggtttgctgagtgtgctgaacccaaacttatactgcttctagaataagcacctccataaatgtacctgaggggggctagagagatggcttcattattaagagcactgcctgctcttcaggaagatacaggttcaatccctaacccctacatggcagcgcacaactgtctgtagctccagtctcaagggatctgacacccttttctgaccctgagggcggcaggcatgtacacgatgcacagacatctgctgagataaagcactcatcacctaaaataatttttaaaaatgtactgaaagtgctttttcctaccttataactatggggtcaattcaagctgaccagcacctacaggcttaaaaaattatgtgtagcttaatccccttcagaacaacattctctataaaataaaaggatggaatcaaaagctcctactctgaggccgcactacatcacgtataaagtcataatgtaatctctacacacttctcagaactctctgtggagcaactgatatacctgatatacctcaaggcaagccctggagctgaaatgggaagagaaacctttggggaaatgctacacctcaagagttacggaaataatttccacagagtgacagccggaatccgcagaaatgaaactagattgctaactttccaattcccaactttcttcagtcttctcattatgagtcacactttggaaggagaaacagagctgaaagggattttttgtcatatgtgtttgtagagtctgcctaagcagtctttgtgaggttcttgcttcattttcattcccttgtcagctacagtaaagtcccccaagctaggcagtaagggtgaggaaacgagatgaactaggacaggctggtgtcgagaacagaacctggggcagctcctattcatgcaaagctgagcctctgtcatgaagctaagctcattgcctggaccagagtgtagaaatgttgaaggacccagaggagacagaagcaaccgcaggtctgatgcattcagtaggttgagccaggagatgagcataatgtgttaggaactgcaaaactatctgctttctgctaccaagcataaatataaacatggctgcttctttgtcactctccaaatgggatacaaaagtgtctgctaattcaccatgactgagaaggaaattccggggaaccattcagaccagacagataaacacattacaaaactctgcttctgtcctgctcaaggcactgccattggatccttcggcagtgccttctgaagtagtgtgtcttcattgtaaaccaaacattgaggaatacaatgcatgctttatgcctggaatgatggcagaagaaataatgccagcattaccctctaataatagcatagctgtcaactaattagatccttctgtatctattcatattctaaaaggaagaaaactccttgaaagtccatcccaacaatggccatctcattctcctctgagcctgctgctcatccctttgtttcttatcaaggctcaagaaacaaactctaccagatttcagtagcaataaacaggatcttttgttgtatccaagggtcaagatctagaatgctaagggacatatatcagtcaaaacatttttcaaaagaaaataaatgaatacctttatattgaatcaagatactacaaaaatataggttggggttttcaggcatttattgcagaagtctatctgtttaattggtgtattagtttttcaggtctgagcgggccagagatgtgagcatctcctttcttaggagtgtctaatgcaaagcttccgcggacttgggtaccatagacaaagccatctccatctaagttcatccaacatcttcagctatccccaaatgattgacaatgatgatatccacatatgtttcccatcttcttctgatcatttaaaactaagtttctcatgttctttagcacaagcaattgagagcaacaagcttacagatataattataaaataatgcaaggccagagacaaccctttatcctagaaccttttatttttaaattaaattatatctcacaggaaaaacactgaactatttcaaacaataacaaagcaacaaacaaaacaaatcctcatgtgggtgtctgtgcttttccaaagggtccctagcacacaatctccaatagttacagccctcatgtctcaagaatcacaggaatgtgaaccatgcctgttatgatgttctggaccctgttaagtgccaaataataaactttttctctggctttgtaagcaactagtccattctgctattgtagcataaaagagcacttgattcaataaaactttattcatggaagcaaaggacaagctatatctggcctctgggtggtagtttgttagctcttgttctatgattctgtatatccttcaggctcagagtaccttgaaagagccaggaggtcctatcttctttatggtcttttccactactgctttacagtcttggaaacataggttttgtcagagtctttgttgatatttcagagaagcatcagttgattcaggctcatggcctcctgagctattactgtcctgactcttttatttacactgcttgctttgatctacacagggagtcaaagccttaaggcactcccaagtatcctcctcacataagattatacaaggccacaaatgccttttggtgctttcctcatctctgaacccctcctccacaatcccagtttctcagtccttttatttcctcccttcctttaccaatgttttgcatccagaaaatattttctttaaaaaaaaaaaaaggaaaaaacattccttgtgcctcccaacgtccacaaagagaggcatctctatatcagctgtcactttaaaacaccaacccagcaatacacacacacacacacacacacacacacacacacacacacacacacacacactcacgtgcattacacactaacaggtttatagaattacggagatgagagattatgcgggaataaaaataagttccttcattttctggtgcattccttcagatataaacaaacaaccggggcggaaggaaaagcatttgtttatgaaagcctgctgcttgagctgagttctgggcaggaaggccacccatgtaagctcaggacccggagtccaccctgcgccccctcgtgggcggcccagagaaacaaaagtcaggtccacccaaatgtactaagagcaatgacagtctctaggtctctgcaccttgaaggccttgctcttcggaagtcggtgggtgcgtggtcagtgggttctgctcagggtcgctggataccactccctgcagccaggtatgctccgtgcccacacatgtggctttgcagaaacagcagctagcatagtcagagctacacattcaaaattcctgtttcactttgtgtttcctaaaatatttgaggcattagttaggtgggtcccccgaatcctctgggggtcactccactgcttcctagagcgagccccatctcctggggctcctatgtcactcagctaagggtggcaggttgcacttgcttaagcaacctagctggaagaaatatcgctcccatgggagcctagcttgggctgacactctagcccagtaaggcttccctttggttccggctactgtcgccagggggtgcccttctccactgttcttagcttcagtatcctagataacctctagttcttggaattttcagtcaaaacacttcccggaactgggagagggttgattttatccattcttttttgaagcccctctgaaacgggctgattcttatcagttcttcttcgaagcccctctgaactttccagcctctgggtggtagtgctccagcccagctccagcacagaattctctttgaacaaggcaagaccagacaggatcatttactgtcctttcctacgtttaatgtttactgaaattgctccctgaagcggattcattcgcagacagtaacatttcgaagaggagagttagttaatacctaattgattcttacaggaaagcccttgggcttcctgcttcatagagggggtagcatcttagcgacacgggggcggggggatccttctggatttaaatccctgggatttaaattgaaagtgaggctcaacaggcccagaaggtggttcagcaggttaaatcccttgagtttaaactagatgacctgagttgggacctcagttcaatcccagggaaggtaaggaccaactcctgcaagttgtcctcttacctcctgataatggatggatggatggatggatgaaaaataaatgtaattaaaaatcctttcgacgaaaatgagggttccaatgctaggcggtagctcaatggcagagctcttgctcaagtccctggcttctatccctagaactgaaaagcagaagggggcggggctgagtccctggctttagttgtaatagtgatgcatctcaaatgtcatcttaagaatccatcataccattctctgtttcccagtggttaaaccctgtcaccagattacacatctgctctaccagtttcatctccatcctaaactgagtcaggatatttctatgggatctctgttttggtagacaaaattattgtttcccatcttgtaagcatagttgtatttattgttccatatgggtttttttttttcagcctttctgcatgtttttgagagaggattttcagagaggaatgtaatcttcattctgtggggagagattcagcttcatgtcaagggtttgaaaaaacaaaacaaaacctctgctgtgttaaacagggcaagccagatactttatggtgagtgatcaaaatagagtatcacagaatcaagggagtcaggagcttgtaggtaaatagagaaaatgggagcagaggcatataagaaggtaggtcagtgtaagtagaggtgagactgtctgagggcagtggggtatgagggagattatgttcaaatcccagtgtatactttcatgcaaatcaccttatgtaacactgtaaaattctttttttttaattcaacgaggttgtcagtaaagaatacatagagcagagctgggagagaaagaaaactacaagagatgaaaacacatgagcatgatcatccttggaacaaagtcaatcagatgcataactggggtcaagaagtgaaagacagggctggagaggtggctcagagtttaagagcactgactgctctttcagaggctgtgagttcaattcccagcaaccacatggtggctcacaaccatcttgaatgagatctggtgccctcttctggtgtgaagatatacatggaagcagaatgttgtatacataataaataaataaaatctttttttaaaaaaaaaaagaagtgaaagacaactgggtattggtgttgcacacctttcatcctagcactcaggaggcagaggcaggtggatctctctgagtttgaggccagcctggtctataagagcgagttccaggacaggctccaaagctacacagagaaaccctgtctcaaagaccaaaagccaaccaagcaaacaaacaaaaacaccaaaaagaagtgaaggataaggccaggatatgtggctcattggttaaaagcactggctgctcttccagaggacctggattcgattctcagcacccacagggtggctcacaaatgcctctaacttcagatccaggaaattacatcttctcttcaggcttccatgagcaacaagctcccaggcaaagcacagacatgcatacatacatgaaggcaaactcatacacacagtatttaaagagacagattagaagcagtatttgaggagatcatgagtggcttcaaaactgctaaaatatatcaaattgcagattcaataagccccacaagccaacaaggagaaagtaaaaatgcttaccaggtttatcataaagaaagcagccccaatcccgtgccccacacataccatttaatctgtcttttttgtttcccagagttactgctcttcagtagtagggcccgggtaggcaccaaacactaaggaattacagccaggtctggtgttcctgttttccacttagagtagttcactgaggacattgtgaggttttgttcataaagaacagttccaggaagaaaagaatgaggaatgttaagaaacattacagaagtacttgttgctgttcccagctttctatctcggctatcaacagtaacatcttagtgcctctctcaagtctgctcaatgactgtaattgtgcttactgatagtaagtaacttagcaatgtgttgtttccttcctaaaaaacaattgccagatagaagaaatcctcaaccccagtgtattaggatatctgataaaatatgagcaaagagtttacaaatgatttattggagtttactagaacagtaatgtaaatatgcttaatatatgaaattaagctgctgaatttctgaattggattcttagagagaatatttcttaggcaatcctcacctaaggaccttgctattgtgtaggtctgtctgagtgaggcttgactcttacataagccccaaagatatcagccttctggcctgaggaccactcttccaagaaaagtacccattttccaggacagtcatgaatgaggttcaacccaaatgatgattttcttaaaacatgaggtgtgtgtgtgtgtgtgtgtgagagagagagagagagagagagagagagagagagagagagagagagagagagattttggtttttgtaactttgattatgtggttcttgaataagacagttgtaaatgatgtcatgtctcaatgttagacatttatactctccagttagtctcaggacatccaaagaatggagaaatgaaaaaaatcaatgcatacttggaaaagctgagattcaaacagaaaaaaatctattgaaattgcatggcctccataggatggatgggattattagtgtgtgtctcaggagcgtgagaccttagcaagtgctgaaaggagaatgaagaggccatggagagatcatcgcttatccacagagtccaatgttataatggggtcagtgggaaaaggaggtccaatcccacttaactcataccttactgctctgagttttgtttcagaaaagttgttgtggtggtatgtgtactaaatgagagagttattaataatgcttgtccacagagataacaagagcgtcatcagatgccaaaattgccctctaaactcccaattattccgtattctgctgcttctctctaggcaagcagggattgggtaaggggacttccagaaatggaaaggcctaggaagagggcatgaaaaggccacacacccctttcctgggatagagaagggggagacaaactgtgaagtggtggttgagagtagataacctgactggtcaagggatcaccctaagattctatgaaggctggggtgtggagtgctgaaacagcacaccagagggtaggaatgggaagaaaagagggctgtttccgggtggatacatctcaacaagttcaacctgttcagtgtaaatgagtatcagatgcataagttagaactgaggaagaaagaaataagtgggaacatgcttaattgtatgcttttgggaattctgtaaattctccaattcttggaaacttgggacatactaaatataatcctggaactgacctagcagactacagttggaggaagttacaattatttcctttctccattcccagggctcacggactcagcagggaccctattggagaagcaggttggcttcaaagggccataatctgttgcatttcactcatttccttgcaaaggtctcaaagatttgacccagtctctcctctctctaattcctcatctataatgaaatgaacactacaaataaaacactagtccattctcacttttctgtcttctctgcattttgtttgcttttaaaccatgggctgctcttcagatgatagcatggcaacagaaaaccaccagaaatgtgaattatagtgtgactgagcctggggggatcatgttaagatgtagccaccaggggagggagagggaactgggattgacatgtaaaacaatcttgtttctaaattaaataaaaaataggaaaaaaagaagatgtagccaccattcctttcagttttaaaatatataaacctataatataaacacaaactcctcaataacaatctattaagataaaagaacacagcctgagagatggctcaggaggtaaagtgcttgctgtgcagacacaggacttgatttggatctccagtactccatgaaaacctgcacacatgtctggaagacatgagagatttggagacagcagatccctaaaactcacagagagtggagctagtcaactcagtgggagagctgtctcaaaaactaaagtggagagtgactgaggcagacacttgacattgactgctagcttccacacatggacacatgacaggtgtatttatacacacgtgtgtgaacatacacgttacacacattcatacacaaatacacaggaatgaatgaatgaaggcaaaaatttcaacattaatgaaagccaaagttgtcacaggggtctctgaggacgtacgagatggcaccccagccaccttcctccccattgacccctccccacacctctggcagtgattttacaagccaacagcagcaggactgtaaagtgtaccagtaaaccccaaattattacagggatagacagccaaaccacaccaggatgtgaatcagttagtcttcaggcatctgtactggcctctctttggggttctgtcaggttactccctcagctgcagccactaagagcaccacctgtgcacattcattatgtttccttttaataggcccctgcccacctcccgcctctctcttctttctctcccatctctgtctgtctgtcccccctttctccctctccccactttcctctctcctgctgctcctgtccttggaggccagtctcctcatcccctttttatgatctctttccctagcaaaaagcccttctgcttgaaccctgtctcatggcatctttctctcgaggtgctgcttttcttaaattaaacacctctctacacctctggcagtgatttcacaaaccaagagcagcaggaaagtaaagtgcaccagtaaacccccaattattacaacagggatagggcggccaaaccacaccaggtgtgaaccgcagctcaaggcattttgcaccagtttgctcaagaccatgtctttttaagtggctttattgtgatagaaaccacatgccataaaacacatttcagctactcaggtcagcgggttttaattttataagatgtgtggcctagccgtcccattagctaattaatttaattccatggtattttcattactctccagacaaatctgatcccactagtagccagtccccttttctttcttaccctagtctgtgtaaccaataatctgtgttctgtttccatgaactcacatcttctgtacatttcacagagatggatcaaaaaatatgtgagcttctcaagggttatcttgggtgtagcatggaccagcactttttttcttttttactgccaaatatctaccacgtaaacacatcatctatattgtcctgttcatccttggtggacatttaggtagtttccaagctttattactacaaacaatatggccatggatgtgaaagacaggtcttcatatgggtattggagtactaggttgtatggaaactctaaatgtagccttttgaggacgttactatcatgtagcatttcttaaactaggattatcttattgtaatgagacccaagtgttaacagttactgtgtgtttgtgccaggcaccactgtactgctttgtgtgagcacctgtgtaattcttttaataacattatgatggagaagtgtggtcaggtctccatatctgtgtgttctacaactgtatttttaaccacatatagatttaaaatattaaaaaattgcatttgtactgaacatgtacagatgttttcctttgtcactcattatttcctaaacgatgaagaatgacagctatctatataagtatttacattgtactgtgtctataaatacttttgacatcattcaaagtgcatggaagtacacagttggctaggttatatgcacatactatgcaggttataaggatcggaacatttacaaattttgatgttcatcacgaatgtgtctcccatggaatctgtgggacaaatgtactagtagttgcctcaactggtagatgacctctgttcaagtcacaatcagcaatgttccctttagaggtagtgcctaaaatctgagattttaacaaactaaaggtctccaaatgacctgtgtcaggtattttctttacatcatttgcaaagagaaaacagtagctagaatcaatatgttctgtaaacagttatcaatgattaagagaattctaatattcacaaacttgtctgggaattacttttgtaattcagtatcctgaaaacagtcttcccagattgcaaaaattgtaaattttaaactttgaaatggacagagttgctttacataaaaaagtgataaaaaatttaaagtttttgaggggtaaataacatacataatcaatgaaaataaacataattccccttttttcagataatagttttagatctggatataacttgttcttttctttttttttttttttttttttttttttgagacagggtttctctgtggctttggaggctgtcctggaagtaactcttgcagaccaggctggtctcaaactcacagagatccacctgcctctgcctctctagtgctgggattaaaggtgtgcaccaccaatgcccggctggacataattgttcttaacctcagaaatatatatacaaaccaagtgagtcaattagtcagaatacatcataagaaccttatacaattgtaatcctaagaaataggactgaacattttatatacaaaatgttttgttattgtaaatatcaagtaattatgtgacaaaattgatctggacataaataaatatagtggttttaagagatttttctcttgatggtgaacttcttgtatactttgtattagtgctttactatttttatccaattaattcagctcaactgtgggataacacctgttgcatatgtaattaaatgacaaatactgacagataacaaatgagcaattatagtagctgtttaaacacgttttcattatttttatttattattattatcataatttttggtgtgtgtttgtgtgtgtgtgtgtgtgtgtgtgtgtgtgtgtgtgtgtagaggtcacacacatgtagaggtcagaggccagacaacttttcagagtctgttctctcattttatactatgtgtgttcattagtggttgaactaaagtcatcaggcttgttagcaagagtctttacaaactcagtcatctcatcagccccataaaactaggcatcatgggatcacactctgtaatacttactttgaggttggtgcaaactcagtatccctttagataaatattaaagagtatagtacttgggtcaaaaaataggtactttgtgacttttgttttctatagtggtcacaccattttacattcctgccaacagtgtatgagaattcagttatttgctctgtgtagtgctgtctggtttggaacttgctctaaactgttttccaaagcaaccatgacactttaccttcttaccagcagtgtgtgagagatgaaagtcattctatccttcatcaacatttcctattatcaccctcacaaaaataatggccatctttgtagatataggtggccttttgaagagcaaaagtttccttactatcttaaaacaattattttttttgcttttccttcttttataggttacattattgtgtgtgtgtgtgtgtgtgtgtgtgtgtgtgtgtggtatctttaagcaatctgactgttcaggcagcaaagctggagggcagagccacctaagcctgccgatattgcacatggggctgcaggacttgctgtttccactgctgggttttggtctttggtccagtattgactgactattccatttttcccctttggcatgataatgtatattctgtgccattctatgttaaaaatttataatttgcttgctttttaaaaattttatagggatttgcaactaagagattgccttgagtctcagaagagactttggacctttcctgttgcctccacaaaacatcacaattaaggtgacttatagaagaaagaagttttgtgtttttggttttgttgttgctcagcttacagcttcagaagatgaaagtgtaaaatggtggggacatcatggcagcagacaacaggcatggtgtcagaagcagggagctgagacctcagattttgaatcataagcaaagagagagaaaactggggatggtctgagtctctcctcagagcctgtccccagtggcaagctttcaccaacaaggtcacacctcctaaacctcctcagccattcaaatacagaagcccctgggggatagtcccattcaagctaccacactgcctgatcccaagttccctgacttcttttcctttattccctctcacactgactcccagaaggtctatggctttggtgctaagatttatatatcatgatccattttgaatagactcttccatgactaggctcaatgttacccacccagctacccaaggtttccaatgttgcaattgttggagcacctaagtttttaaacagcattaacctaaaactaatttttctccaatttgctgtagtgttacttcttcacttgaaagagctgattactactgaatcaaagacttcaggggaactcttcctatgctggcctttacaatccaggctgctgccctggccctcctgaggtctcctgaatcctacactgagagaaactgcaggatggtgtctggatttccacactgggctgcaactgtgaattctctacaagcaatcttttgggccctgcagggctcattttacttgtttcctttctgtgggaacttgttttcctgccttgtgtgttgtccagtaggaaaccacttgctctttttcctggttgtgtaaggtgggagaacaagtctgatcattggctagaagcagaatttctaataggattattgttttagtatttgccaatctggtttataatgtgaagtgcctattctgggcctggggttgtagctcgattgcttggatgtcacattatggaatgacaaatgagaatttcccttcgagtggcttaggtcaagagcctctctgttatgtatgtctgatctgttgcagttgtctgtctgttttgcctgttcctaacaaagtgcttttctctgtgcttattgaacaacccaataagcatggtatgggagggaatgagattttggggggtggagttcgagacagggtttctctgtgactttggaggctgtcgtggaagtagctcttgtagaccaggctggtcttgaactcatagagatccccctgactctgcctcctgagtgctggtactaaaggcatatgccaccactgcctggtgaaatttttttttaaacagaactctcgtgaacagaattttataagggaagaggttaatttactgatccccaactgatatggaagagcacttaaactacacacagatggtattaaacatatccacatgctgcttccaatatttatggtgcatatttgttgtttaatattgctagcaacctcttggcagcaatcagtaccataacacacacacacacacacatacacatgcacacacacacacacacacacacacacacacacacacacacacacactacaccacaccacacactattccaagttaggtgagggccatggaaaagagcatagtttaagttgtgcatttatcttaggttgtaaaagctgactacatggaacctgaaaggcatagccaggttagttacattgtgtgttcttcaagtcaggttaaacttaagcaggccaaatacacagtatatagcagattgactacatagttataaatgatctcaaggcagattatcaacttggtttcaaggtctggcaaaagttcattctctctgaaggcaagagatattttcagaaagagtcgttagtaccttatagtatagtacttgctttgttttcttttctgttgctattataggacactgaccaaaaacaatttgggaatgaaagggtttatttcagcttatagattccagtctgtcatcaaaggaatttagggcaggaacacaaagaagaaacccaaaggcaggaatggaagcagaggctatgcaggaagctggttgttactgccttgctttctctgacttgtccagtctgcatttttatacacccacctgtctagtgatggagctacccacagtgggcttgtttctccaccaattagcaatcaagaaaatgctcctacagacattcccagaggccaaaacgatggaggcatttcctcaattaaggttcccttttcatagatatgtcaaattggcaacagaagctaacaatgacacctagtatatgttataccttgacttctgtctccaggatcacaaaaaaaaaaaaaaaaaaaaaaggctacctcgagggcattcacacataccatcatcatcacagcctcctctcatagtaggcatctgggttatccacaagtcattgtgggttataatggcctaaagcagaagtgggtaagctcttcctcatctggatggagaaacttcttggtattatgggctgtttgctcattcattctcagactatgatacaaatttaattttcctggattgcattttgggtgaggtcactttctgtcttggtgacttgaggcagaataaccattttgaactcaatttctctttacacaaaatggagatgctgagaggtcttgctgaggattgagaccccacggaaaaggactttgcataacaatgagtcaggtattcaggcacagggctctgcttactggagccatcactgacacttgttgggcagcgccttcctctctcttggtggaaaaagcaaagtcttcaggtctccagttatctgctcagcctttatgtttgccagatttacaagtacatgctatttaggttgacttcaggggagatctcatctagtctcgtgattttaattctacgtctaaacttattattctcaaataatatctgtagcatggaacttgactttgaattctagccctagatgttccggttttcatcagcatatgcacaccaatgactgctgtccatttcctgtgctccggggatctctctctcctttatgcagtggtgggcccacctgcatatgtaccatttcttaaactactgtgacactcagcttcagcctacattccatcaatgggaagctttccagacgccagggcagaggggaatgaaagtcctacatttctggatgcttctgttgtttttagtagtctgtggcagaggcagaggccttgaccctgtgatgacattgttctctccctattgtgccctagcccttgccactgttgctagtaacctctcaggcacccagccacatctggctcagcttttcagcaaggccatttacctttgcaaccaatttcttgtggttggcataaccccaatgattttcttttctgatgtgaccttacctggtaaaattctttaacaggcatttcaaaaaccaacacagttctctctctctctctctctctctctctctctctctctctctctctctcaagttatttattttatgtatttgagtgacctgtcttcttgcacactgcaagagggaatcagatccgttatagatggttgtgaaccaccatctgtggttgctgggaattgaactcaagtcctctggaagaggagccagtgctcttaaccactgagccacttctccagttgggggggggactttttttggtttatttatttatttacttgttatgtgtacagtgttctgcctgtatgttgcctgcaggccagaggaggccaccagatctcattacagatgcttgtgagccaccatgtggttgctggaactgaactcaggacctttggaaaaacaggcagagtgctcttaaccactgggccatctatcaagccccccattgttgttgtttggcttttgtgttggctgccctggaactaactctgtagatcaggctgtcctggagctcacagagatctaccaagtgcttggattaaaggtgtgggccacctccccacccagcaccattgactcttgattggactggtttcggagcctagtaagtgtccttgtctccacaggggacttcagttaccagaggaaccattctgttaagtactgtttattgccttcttttgaaaatccttcagtaatttgtttccttggttagaagaatactgtggccaatgagtcccaagctaaccagcaccctctatgtcatttattcttagtctttttctttggaatgtgaacagaacaggtgtttatgcagcacaccctgtacagccagagtatttcacatcaggatccacactatgcatgttatatgaagcttgtaatttgtttttatttataaagttcatgtgtcccatgttccagcttcttaaactataggccacaactgcacactggggtgtcacaaaaaaaattggccacaaaaagaggctcctgagcccattatctatggtgggaaaccttgatacaggggggaggggcttggtccttcctcaacttggtatgcctgactttgttgactctccaaggatggccttacctcctaggaggattggattaggattgggaagcagggccaccagagaaggtggggggaggggtaactggggttggtatgtaaaatgaaaactaaacttttatcaagttaagagagagagagaggagagagagagagagctaggctcctgaatgtgcagtgaccaaaagtgaatccaaaatcaaccgtgtaacaatgtgggtgtgtttctggcagcaattgcctgtgctatttttcacgatctcactgtagtcttggctctgaacaagtgacaagggctcttgcttctttgtcaacatgcacccgcagacagacagccttgttcacatctgtgactatgctatgagttgcatgcagtgtttggattgcacaaagttttctgctcttcacataatgatagcagataaattgtggaaacccaatgcatttagtattttcccaccaccatttctcagcatgtaagtataaaatcggcatatcgctagattctattgtgttataatgtttgattttaaagttatcgtttggggtcctgagtgcatctcatagaaacgtcataaactgggcttgaggttaggacagaacttcagcaattttgaaatggctctaaacatacctctgccattccgtactgcatctttgtatgctgcagtggtctcgccatctacaatcatctcatcaaagtatcagccagttcggaaaattgggcatgctgctgagtgggtcctgcagtatccagtgttcagtgacaatttcttcatgtaaaaacaagcaaatctggctctaatatacaaatttgtttttaaaatatggtaaaattatacatgtatataattatatatacatatatatatatatttatagtaaccaaatacttgttttaaatttctctatgatttattgtcaaaaaatgcttgatttgtgcacctattttgtatccctagcttgtggaggttcaaagacaatttctgaaatgaaaggagtcacgagaggaataagtttaggatgccttgctaagtgctgtgtatgtctggcttgtgaggcttggagcagggccaggcagggctgcgctcctggggcagacagaaggcgcatgctccttggagttggcttcccggcggttaagcagatggccgggaggggtggagtcaccgggacacttcccggtgtggactgctctgattggctgtgagaaaggcccgtgcctgctcggttctcttatcaagaccatgtaggctgcaggctggccacactcgcctgggctgtggtgggcactgctcccagagacagaggttggagggtcgcatccggtgagtgacggcctcgggcctggccgggtgcagggggctcgtgagctggtgtcctgcgggtccgaggggaggtccccccaccgtctctgtccctcagttgctctgctcctggggcgcttttcgcctcgggtacatgcaggtgctttgaggatggcgataccgtgggtctttccaacaagtggtctgtccttccctgagagccctccagcttcctggacaggggctgtcgcggatcagggaacctgctcagaattcctggactggaagagagatagaatgcctgcctcttattttccttcattcctcccgttatccctcctaggtagtgttagccaaacacaggatcaacagcaaacttgggcatgagtcctggttaaaaccccagtgatactgctgtataattagctagctctttacttccacaatttgactggtctgtctcactttatcctgaaaaatgggctccctagtactgtcgggtctgtagaggagtagactgtaggaggcactgtttgcaggctgggcattgccagtagcttagtagttatagaaaaactacattgagcccatattttcgtttgttgttgaactgtggagctgccccatcccatttctgaaaagcagcaccggcacattcagtttgtgcaggacttggcagggtcctggaggttcagagttgaattagacttaagcgcttcccttccttctttctgaggtgaaatgaaggcagacagataatgaattgcattgctatgaagccataaatactgtaataaaggtgttctgagagcccagaatagcacactaaacccagcttagagccttatctcacagtctcctgtaagaaagtcctgtcaagtttttgagcaacagagttgtgttggaaggaaagtctagccggtggtgtttcacatgagtgagtcccctttggagaccacatcccgattctgtaaaagcggcttccaccacctgcttattttaagctatgctgagaacatttattttataataccttcccctctttcagtctaattttttgttctctaatactgaaggacctctgggacagtgaccttaagataaaaggtagccttgggcagtgcttcataaagctatgctggtgactaaaagcagtgtgcttgcttggccagcacaaactcagaataatatctccttctgtctacaatgctgagatgcactgttgcttggagaactaatttcaggagaatttgcatctcccaaagggagtcagttctcctctgcagtctcctgagagccaatttcctaagaaatggggaaaacttgctttaagagagtctttatttagttgttattttcaaacaacagtcctgaggtgttaacatagactggcaggacacatttagaaatttctaagtcttgccatgagcaaatacctgtgaaattagtatattcagtagtattaaggtaggcatcgcccctaagagcccctgtgcatgatccttgtggatttttccctcttgtcctttcttctccgcagacattaatctgtttcctgtcactatagactgcattgcattttctccaagtgtttcgtacattggaacaattccttccctctcacccctcccccactctctccctggctttttttgacgaagtataattattttgagctttgtccatattgtgtgttcatgctgaattatgtatacataaacataatttgttgatccattcattcatttggtttggctgttatatacaaagctggtataatttgtgtcaaagtctttgggactgtgtgtatccgtcttttaaagtgattctgtgcctcccagagacggttcaagtcatttgtttcttatctgtcttcctgtaggattttatgctacacctggttcaagactttgaaacagggcattgaactgtcaatgcatgttcgtgtggtaacattcagctggctactttaaagtgatcacagttccaacatttcttctaaccttactctgggcattgttagagacttgggccacctcgctcttaacatccccagctctttgctactctgtaattttgagccatcactggggtgatctttgttgatgattgaaaagtttgtctttccttttgcttcatttttattcgcttgagtgagagttttgaattctgacagtttcgggaaagagcgaatggcagagacagcagcaggggagagataatgttggccaaagttgaaaatatgttgaaatcccaagcagagagggaaaagccgggagttctgtgactcttcctttttcttatcctgtctaagttcctctccatgtcgcttctctaagaacagtttctttactttttgaggacatggtcagtgggtgcacaaggcatcatgtggtaacttcgggtggtggctctcgaggcttcttagtaaaaccaaatccatgttttccctcccagagacggttcaagtcatttgtttcttatctgtcttcctgtaggattttatgctacacctggttcaagactttgaaacagggcattgaactgtcaatgcatgttcgtgtggtaacattcagctggctactttaaatagaggaagatgcagatcctcggcctggtggtctgtcttttcctttcggtcctgctttctgggaggcccacggggtccattccacatgtggaccccgaagcaaacatgaacgtggtgagtttctaaaagtcacctgtttttaaaatacagcaatgacaagtgctattttcttttaaatagagttatatgagctgtaggaaggcataactaatctctttatggcttgttgtgatttttgctctttctgaattgcagatgctacttgctagactttttcccattaaatgctgctgaacacaatacatggcttatgctaaataatgtgctttagtaatttcatccttaaatcattttaaacaagcttcaaagctgataacattgtgtaagccctttacaagaatgcctttgtttctgctgaacatgggctgtgattgacaatgtccaggaaacataactcaatacagttgtgagaacattacaaagaattgttagaagatataagcaaaatattaaccactgaattaattaaaacatttcaagattaataatctcaaggaaacagtggaatctggaaaaactacacataagactacaatggcaagaaagtatagattatcaaaaaaaacagcaactttaaaatacaatggcaagaaagtatagattatcaaagaaacagcaactttaaaacaagcactggattgacccagctgaagaatcggtgactgcaggacagaaaaatttccaggagacaggatagtatggcatgatacaggccaagcttaagctttctcttggcattctctcttttaacagttccttcctaagggaatagtgaaattaaagtctttctggcatttatggcagagtggataatgaatacttcagtcttctaaagaactgatatatgctttcccactgagctcccagtgacacttgccatggatctttccttatggagaagtgaatttgatgacagtttcccatttttcagcttttcttcaaccacaccttgatgttctagtgaattgtttctgggtctatggctgaaaatgatttttttcctaaagtcttattgcctaggctaggaattttatgaaacatgaaaaatgttagctgacctatttagaaaagaagtgtttgttttacctgggaggtatgatggaaacaacaaggctccaaatttgacacacgtggtgtagaacatgctagaaatacctttgagtataaaacattggtgcctcagttgggatcttggctaccagactgagcagattcaagttgcagcggtttcctttcaaaagctaaaaaaaaaaaaaaaagttactgcgtttggtttctcctatgcctgctttttttggagactgaagaattggagtccagcatagactaccggttgtcctttctctccccagaccgaaatgatcaggtactggggatacccgagtgaggagcatatgatccagacagaggacgggtatattctgggtgttcaccgaatccctcatggccggaagaaccattctcacaaaggtatggtgttttctgtggccagatgtaacagctttgggaagtcatgagttggtgaacaaattcgggcttcatttgacaatgttgccacagcatgggctggaggccaaagtaccagtcaagctgaggtaactgtcttaaagccaggttggctcaaaggtcagattccatgtagattgtcaaaatatctatttctgttgtttctcagggaagcagttatctaatgaactgttcagagcattaaagacttaccttttgcaatttaaaaattattcagtttgttgaaaaggtaatataatcaaatactacaatatattcaagtaacatatatatatattaggcaaacaatacatgcaaaaaatcaagaaatatactgtaaatacgtctttttctatttttctagtttttaaaaagtgttcttgtataatatcttcatttaaaatctgccttccatacattcattagaatcaaatatagggtatttttctgttgccaccttttaagttctaaatgtgctataaaggacatagtgttttattatttatttacttgctaccagcaaactcacaaaaggtggacttatttttcgtcacagataccttccggtaattcatagggcacttatctgaagataagtgtattccattgtatgtttgtatcattacttgcttaacaagtgttctgttagtaaatatttgtgcccatttgaatgttcagtgaacaaatattgctgctcaaaacaacaaaacaagacacacacatatacattgggcaagtttatttagaagataaatttccctccaaagaattttgatgtcatacacatatgaattgtgtttttgacagacttttggaaaactgttctctatgtatgcatgcactgacagtgaattttactaggagtatataaaagttcttatagatttgccttaaaaatatggaccttggcatgtatttatatccttctttgatcaactcataactcaagcaaaactgtggtcctgatgtggacaatggcatttctagaaaaactacctgaaagtggtaacagccatcagggtaatagatcttcctttaatcatctctctagatgtagccagttgctcttcggaaatataaagtctgggctaaggtaactggctatctctctcctctgttagggttttactagacagagtctttgcctcacgtgcttcttaaagggttattcagagcagacaacaaatccaggcagaggtgagctttgtaccagcatctgccttatgcttctcttgtgtcagctgatacgcccattttccctttcctctaggttctgcctgtcacaagacactaaataatgcttttgtggctatgggtgtgttctttctgaaattcatttgagattttgtttcagtgtttacagcgctatagttttgtatttccctggtgaatcttttacagaacgaaggacaaattgtattgatctgtgtttcctgcttacaaacacataaagtatatgttttatgcaagaacaagcacatgatcttagtttccttcctttttttccccaaaagtacccgtgcacaggttttagactctatctaaagacaaataaatatggatattatttgctataaagtacttggtcagttagtaattactaatatgagccattgttcaaaggtccgaggtcaaactctgctgagagaatgcaccacccctgattccatatccacctgcatgcagcaattaaagcatacagggttactatcttgtgcacacagattacattgtgacatgggaggagcttcctgtgaaggaaggtgcccctcagcaaagagtactattcagagccattagatggtcccttgcaggctagggaagtggatactgtgtcatcagaatgtggaacacagactgagcgtgttctcggctagctttagctttaggtccccatcatccttcacagttctgaggagcctccaccttcccctggggaggtcagcgatccttgtgtttaccagccagcctcagaagggccttgtcaaggatttctgtaactttgtgattttcctaagaactgcatagatgcttttcctatggtttgttccctgtggtactgggcagaggctctctgttgtgtctgttgagaaacagtgtggtgagtgctgttaatctgccatcctggaattcaaaaagccaaagagaaacacagtcctcaaaatggcatcgatttcgtgaatgccacttcccttcttccctattaatagcaccgctgtccttccagtgacctaggctagacattgcaaagtcatttctcttgtggttggcagtgctggggatcgaacccaggtcctcatgcatactaggcaagtgctgctgcgaggtatatccacaacctgtgcagaatagttcttgattcccagtctctcggttgcccacgaatatcccttgttaatccttttctcccttgttctgaccgtaccttattctaaactcttgttaccattcagataggcacctgagacagctcagaagctgagagaatcttgaacgactcaattttgaggggtgggatccccatgtaccagagaaaaaggatctcaaagcaggaatatggaaatttagtatcatgttttatgaaatcaatgcttttagcatataagaagtaattctatataatctaattctatacaggtaactataagatccattaaaatgttattgacgctgggcgcatacctttaatcccagcactcgggaggcagaggcaggcagatctctgtgagttcgaagccagcctggcctccagagagagtgccaggataggcgccaaagctacacagagaaaacctgtcttcaaaaagcaaaaataaataaataaataaataaataaataaaatgttattgactttcttggggaacacactgtttacagtgggctcttcagacagtgtcacaggttttgtgtgatcacagggctgagccaagtgtctgctctgcctatgccctattgtaagctctgctgccgatcgatgcctcttgtgccagagtctctgtcttatgtagttttgcagatgaggttgcttcaggctcagctattatgtgattttgtgaggcaatgatcttcatgaatccaatggatgaaggtacatacattccttaatattgtgtcctggctgcttgtctacacttctcaccccatctagagcaacagacttttgtacttgtggctatgggagattattcctgcaagtttccccttcaagtgcgtttatttgatgcctgtgcatgcatgtgtgtgtgtatgcgcatgcatacctatatgtctgtgcatcctagtgcatgtctgaggaggcattatatattcttctgtcctcctccaccccagtcttttgagacaaggtctctcactgagccagaagctggcctgataagcagtaagccctagcgatcctcttgtctccagctgagaccatgttaggttttgtatgtggatggtgggggattttcccacggaaccatcttcccccttttaagcagccattcgcatcagatgttgagccatcgccgtatttgctaaacgcttaagggaactgaaatacagaaatgaatcatttacagagaagtggttttgtttttatctgcttagccttcatgctgagtggtaatgctccaaggctctcatttccttcttggaccaggatttgcaaagcttgtacctttataacatactcctggcaggcttctaggtatctagatctttgtgttcttgatcaatatactaatatcctgctcaagacagccaaggtaaagggagtcacttgggcattttgactgtggaggcagtattccttgaagtgacaacatgcctttacataataagtattgagcaagctgatcccatgatgaccataatatagactttatttagctgaaacaaacaaacaaaaatactacttgtgccagcattaaaaataaaacacaaggccgggcgttggtggtgcatgcctttaatcccagcactcgggaggcagaggcaggcggatctctgtgagttcgaggccagcctggtgtccagagcgagtgccaggataggctccaaagctacacagagaaaccctgtcttgaaaaaccaaaaaaaaaaaaaaaaaaaaaaaaaaaaaaaaaaaaaaaaaaaaacaaggcagagtaacttgctaattgcctgagaaatcagcaagtttttaaaagagaacctcattggtatctaaattctaaattctgcatccgatgacctggttgtgaagaccaggactgactacaggaagcattcagaagcaggcttctcaactgtagcctgggcacagtctccccagggcttgcccactgagtcatttgagtaggtgaaaggttgccacatgccttgtgagttgtcttccacagaaaagcctccaggcctttgttttgatttagcatcctgactgactctaggtaaagaaaccctccctttgaaagaaaccagttgtgggtttctggctttaattaactaattaattaaataatttttaaataaatgcagcttcagtaggcctacataatctggcctgtgagtccctgtacccggggcactgagcacatgcgggtgagctcagtgcatccccaagcttgctgagcccctgctgctgcattgggttggggattgcatttggaccttggaaactcagcaacataattggggttgctgtgcagtttgtctcccaaaccctggttgaggttggagcaaaaaaagaagtgcagcacagaggagcctcgccgttgctctgcctgccccctcctttcctcacacgcctccccttcttcttggctagcagtgtctgggagatttctccagcccctggggctatatcttctgagtttgttttgcagcaattaggtcaacaatagcttagatggatgataacgcgtaattactgccttccccagcgggctaagtgcagctggagctctgtggaggccaaagtcttctctgacttctgtagacttcttgggactggggtgagcacaacactgagactgcaaatgttccttgttgtaggttgtattggggtcaaggtttccctattttccaggctcagagacagccatgaacgaaatctgtgggcttactgtggagggtacagctggagactgtgttacctagtgtgagcctactaaaagtgccagcctcaggcataagtgtgatggtagcagtttacttaacctctctgggtttgagtttcttcatctgttacatgagaaaaataatacttatccatcattactgtaaggccttcgaggcagcttgcccttacagtgaggcaacttagcctgcacagtgagacaccttacactgcacagtgagacaccttacactgtatagtgggataccttacattgcacagtgagatatcttacctggcacagtgagatatcttacctggcacagtgagataccttacccagcacagtgaggcttatagctctgcacagattgaaactgaaccttctctttgtatctttcaaatgatctccatcgtgatttccaatacctgctttcttagcatccagtcttctgtgacagggagtatatcttaaacttcaaagagagaagaaagtttccagaagcatgtttaaatttatttttaccctgggcagaggatgcttaagatacatacaatgggtagaaccatctggaaatcaggtgcaagtgttatccatgtgtgttccccgcgctgatgcttcctctgtggcctctctacttccctcctgagttaaatcatttctcaacattcatctactgtgaattcatgttgtggttgtgtgcagcttttctgatggtctggaaaggcaaaggaaggcaaaaaggcagttcaacacagggacgataggcaccttgatgttgtatcatatggattttacctacaattgtgtgacctgggggcatgggcttctcttcaaaattcagtctacaaagtaagaagaatgatagacagctcctggtatccactcatctgcgagtgatgtatttcagtatccccagtggatacttccaaattccatagatattgttttcactaaactaccatacccatgataaaatttagtcaatacactggagatggtagaaaattatcaagaattataataaaaaaagaacaatgataacactgtgttatatattggcggcattcttagtttatgctatgggctatcattagggaagtcttaaacataactactgctagactgtaacagtagatctgcagttggaaccgctatgtactaagtggttactgggtgtgcagtgtgcacagtgcggacagggtggttcatgttgtgtatgggtgggtgggagtcagcacccataacaggaataacaggaacgtgctgctgtttcatgtcttcatggcattttaccatgtgcaccctgtgccagattcagcttccgctgctgctggcactgcagtgaatgatagggaacacattgctgccttcttgttgcttaacgatcacagtgactgtcaccaggggtgtggagagcagcactgtgttagaggtgggacctggtgatgcagtgtaggttaacctctttcctgcagagagactttgaaatgtgagtacaatggcctggacactgataaagtcccacataacattctgattgcttcctgtggacaagccaagtgccccctgacacagatgaatcatcagattaatagttaggactctggttagcaaatgagcaaaacaaggttttggggggttaagtaattttcccatgataacagcagggacaacataaagacaagcttcctataccttgtgtccaagttctcaccccacacagccctctctgttagggctcagggttacagtgttgtccctgataaagtcagaaaagtatctggtagtttgaacatcagattctgttgttcagtctcctgggctctgtaagtgggatagacctaagccccgctccctgtttcttcctccaaatgggccagaccttacctcttcctttggcacgcgcctttttactctgcctctttctgctatgggacaccgaagaaaaatgagagactcagacttatgaacctttcattggaagttgtaaatctctctctttttttaaatataaattagccattcttaggtattttgccactacaacagaaagggacaaaactatatagtatttgaactattttattttttggcgccaaatcttcaaactagaattaaactgtaaatattcatccaggagccctaattgtggataactgaaaacccaattgttgtttttaatttgtgtggaactgaagagcaggcctggaacttcacacatgctaggctttgctgtaccagagactatcaaccccctttccactcttaccaattattgagaaggaggccctaaggagcccccttgggagcttgttgggggatgtctatgctttatggcttcttcctgggcattttaggcaactcgttcatctctggcccagcttgatgaatcaaggggttggccataaatccctttaagtaggtttgaatacagctctggtggactgattaaaaatagccaggggagcttcataggtaaggccttctagctcaggctctgtgcttagagttcctcattctctagatcggagccagagccggtaatgtgtctgtctcataatctctctggactgcttcagcacatagctggttttggcataggctgcttggtttgccatgagctggctggagacagagttaacatttgtgtgcatacctcttctctagtttttagaattgtttttcctttagatcactggctaaacacaagccctttgaagtgagagagacctggatctcagtgttggcacactgctggctgaatgttctgggccagttgctactttcacatctaggtcacctcatttttaacatggatatgaaaaggcaggctatatatgacatggtgcctcgaacataattggtagctgttttgaacaatgataagccatccagactgtagaagcttgcttgggttattatgtgggtagagcttgtttagaaagctcctaggctgaggtctatctcgaggatggttgtgccaacccttgcacattgagtttgtctggagtagaggtcccacttggttgggtgctgagctcccgtgaactgggtgagtaatgtggccaattccagaagatgtaagctgagggacaattctagctttgtactcccttgtatgggaccatggaaatgggtacataccacattcaaagtccctcttatctttttgcttagaatctgtgattgcagaaggatacacagtccttttgtgggatatgcacgttcttcccaaactagcaaggaacttaaagatgtcaggctacagagggcctggcaaatcctgggccaggcaaagaattctaccatttaagctaatttcttaggtgggtcagttgtgctgaggtcttaaccttccctaggaactacaagcctctcccccactcccccaccagcctggcagtctgagatcactcactggctctggctaccagctatgaagaggaatcaatcccgtgagtttttatggctggtgaaaactgagttgtgccttgctgacatgctcaactttggcctgcttcctccttgcccttagtttcattccttcatttgatcacaagtggttccccatgactttctggagcaaagtaacttcccatgcacactcgtgtcttgggaggcaggggaacttccccacacaccaggtcttcctcttgtgaaccacagtcattgtcaaacctagcttcacccgagattcacctcatcgggcaggcagcatcacaataaacagccatgaggctgctgtccccagcctgcttggtggtagctgttcagttgactaaacaggatgaagtcattttgtctgtccttggtcagaaaaatgatattttaggcctttttttttagctcccagaggcatgactttcagtaatttttgacacactgttttgtaatttcagacttctaatgattatttccatatttgccaagacgaactcagatcttcactgaaggcagggacggcacatctagtacagtgaagacagaacccttgcagtaaatacagtctctctgactagccttagagcccttgcagtaaatacagtctctctgactaaccttagagcccttgcagtaaatacagtctctctgacaagccttaaagtgccactagaaaagcaaagaagctaatggacccgggttggcccattttcttttttgtctttctccaaggtggtgctttcttttgcttttgttccttgctgtgtctccagtgctgagaaggccctgtcacagagttggtgctgaataaagtttgcttgatgagtgactgcatagtctcggccctatatgtctcttgaggtcaggaagtggatgagttgtacatccaagtctttgttcttcttgcagtttaactgcctcaagaagaggtgaatagaagataaattcatagacactttttgaattcatgtgtgtattttttctatttagctttctctaatttttttgaggatttagtacatgagcacattcatgtttatcgtatctacccttccccgaccccacagttcctctgtgctccccttcaggttcccatcacaaattcatgtcttatttgtctgtaagactttattctacattgtcttttttttttaaattaaactttgctgttttttttttaaagatttatttgtttattatgtatacagtttttgcctgcatgcattcctgaacaccagaagagggcaccagatctcattatacatggttgtaaaccaccatgtggttgctgggtattgaactcaggacctctggaagagcagccagtgctttcaacccctgagccatctctccagccctaaactttgcttttttaaataacagatttagggtcatgtcccgcgcgcgctctgtatttctcgccagcaagaaatcatacgcgggacactcggatccttctgcaggaaagctttaatgcatcttgagagaggagagcataagcttaccagagcggagaccccaagccaagaatcccgtcccctaataaaggctggcaaccaccgcctcggacgtgtcaccccatgattggctgcagctcatccggccatatgacgccacggaataggcagagatcaaggaatggaaaattacccagcgcctgcgcaataatcttgtttacattcggtgcctgccggatgcaggcgccatcttgtaatggagaatgcagggacggctccctacagatccccctttttttattaattaatgataaggctttatatttttacaagcaaataggtcacccatatgttgagggatagaggcagaggttgtaccttcccaatcaaatattaagactgtgtacaagagtcgccatcaggctgttagcttgacccgaagcgctctcgacctgtcctctgccgtttttctgggaaagggagactagggcaggcaacccttatgcaggacaacatgcctcccagagaagcctgcatattgggcaactctctgtgcgatgccttgctcgacatccctcatgggctgctcaagccaggcactctaccctgtgcaatgagcctaggctccgggtgtgcaagagctgtctggccagcggcctattgcttaagcatagttagccaaatatcagtggaagccccttgttccaaagctacaagcgcttgggcgataaccaccttgtctctcttagtttgagccctgagcctacagaccagccagagaagcaacatcaatccgcagcaaacggctgcaccaaacaatcccacctccacccattccttagaataggagacagctgaagcaatccatgatgacagtccctccgtcaaggacaggagttaatctggataatagcggctctcaactcccggggagagggtggagttccgacttttgagggtccaaaggggctctttgggtaagtctttctgggatccacaggggattctcttcatcctgtggaaaaacacacatcgctcccctggatcttatgagaataggatccgggcctctccaaagaccagttaagatatctttccattttaccatttcctttggcctttcaggttctgagatgtggcacttggccgcagtatggccctgagcatcaatgtttagaaaattaagggtaaagagtgccatggatattgcaactcttggcaccgagggtaaggatgctcccattccctccttttgtttgattaaataagacttaagtgtgcgatgggcacgttccacaatgccttgtataaggtaggccagttagatgggtaatttccatctgtctgtagaagtgctggaacttttgagaggtataagccggcccattatctgtttttaagaagcacacaggtggctaggtaaagtcttatttctgtaatacagctgaacttccttaaacagtagcttaacttctttctgaggcagggttttttttgtgactttggagcctgtcttggaattcgatctgtcggaccaggcaggccttgaactcataaagatccatctgtctcttactcccgagtgctgggattaaaggcgtatgccgccaacgcccaaaacttaaaggcgtgtgtcaccaacaccctgagcttaaaggtgtgtgctaccaacataatagattagcatcttttacaaaacaagaactttacattgtcaggctttgcttaaaaattctaaattgaagctctttaagtacaaacattaataaaatcaaacatttgaaaactggttttaaaaagaaatttaaattcccttaaggtctttctgtaatatatagaagcattaacattttaaatcttaactgaaaaacttgtttctaagatggtacctctaatttccatgtggtaacctttagtcaagatggcggtttaagtatccttttcttaactttagcaaaatggctaccgtcagtcatgtgaccagctacaaaatggccataccaggaaatggaacattttaaaacaagcatacataaattacttgagcatctttaggatatgaggcttttcccaggcaccccaggcctctaagaagttttgaataacatgtgcggccttttcccctgtcaaagactgggaaagccatctgcaattttctccgctcctctaatggtaaaaaggagtcggtaccaaatttttgttgtaactcatataatgggggtgctgatggaagtacacccgctggattaacaggtctcttaaatttaccggggtgtgaccggttatcccctattttctctccccccttttttgtttctttttcacctagctgagctgtttccccagtatttaagacttcatctcctgagcttttagagtcagagctatcaagatttaaagctttaaacttatttacagaatcatctaacaaattattcactcccttgtcagtagacatcccaggaggtccttttttcttatttattgctgtttctcttaacaaattatttactcccttgtcactagacatcccgggaggtccttttttcttatattttattgttaggcgcgccccatctctcaccacattcggtttctgatatataattctggacttctttaagattgttacaacagtgagaaaagtcaaaatagctcctagtaaaagcatagaagcctctatattaacctcccacaatagcaacattcccaagccagagtccagaaaaaacatacctctccgaatttaccaccctgcagttctgaatccgccttgtagccaaggggtctccgaggtgccggagatgttcatatgttcccgggtttcggcaccatatgtcccgcgcgcgctctgtatttctcgccagcaagaaatcatacgcgggacactcggatccttctgcaggaaagctttaatgcatcttgagagaggagagcataagcttaccagagcggagaccccaagccaagaatcccgtcccctaataaaggctggcaaccaccgcctcggacgtgtcaccccatgattggctgcagctcatccggccatatgacgccacggaataggcagagatcaaggaatggaaaattacccagcgcctgcgcaataatcttgtttacattcggtgcctgccggatgcaggcgccatcttgtaatggagaatgcagggacggctccctacagggtcacttcaaaatcaagcagatgcagggttgagcaaccaacacttccaaattttggcaatgaataaatctactataaacatcaatagacttcccacatgcctctgtcctgtacatgcgtagcctcatcttttatgaacacctcagttgtattcattggcatgtcactgtcactcagcatctccagttagttctgttcaaatgttagaaatgatgcacaaagctccccgaagcactcatgtgtgtttctgccatcccattgcccttcatcttggccaacagttgccattatctctgtttagggttcatccattgttgcagaggtatagaaccatctcattgtgtgtgacatttcctcccagtttattttgtttggaatcattgtgattatagaaacattttgcaagctcacccatgtctattaaactttattttgatgcttaagtcaacggttttttaccagaaatgcaaacaaaaataaaaaccaaaaaaaaaaacaaacaaaaaaacagtgtagtttttgctgcatctttgtcaacaccgtttaaaggaaacatgtctctccagcttgttaatctgtttctgttgctctatttgctttggtttctcttaagtgttgacagtttagcaagacagcaaatttgccgaggagattggatataataccttctaaacatcaatgtttttcaggtcccaaaccagttgtctatcttcagcatggcttcctggcagattctagtaactgggtcacaaactctgacaacagcagcctgggcttcattctggccgatgctggttttgatgtgtggctggggaacagcagaggaaacacctggtctctgaaacataggactctctccatttctcaggatgaattctgggccttcaggtatatcacaagcgattatgactggatctgtgtctttagcatccttacgatagatacttgggaatctatctgggaggtagtgtataacgaagctgatgtcttttgacaagttgtgaaacttgtcaggaatttaatagccaatgtgatggtaaatttgaataaatgattgcataagtgattagattcagctaggaattcttaagttattctgaaccttcctggcattagggaggagtttaggttaaatatcactccccataacacacatactcacatgtttatcttactgctttctatctctctctttcttactcctcactctaccaatcaattgttatgtgatacttagcacagctataaatgtctgtgtctatttccttatctataaaatggggatgctaaagtcccagctcaaactcactgggcctaaagtaaaggattcagggaaggagccatcacagagcctggcatagtctcagtgctttctaacaattggattgtcgttttccttttcctcctccctcttccttcccctttctctctctctctctctctctctctctctctctctctctctgtctctgtctctgtctctctctctctctgtctctctctctctctgtctctctctctctctctgtctctctctctctctgtctctctctctctctctacacacacacacacacacacacacacacacacacacacacacacacacctacctacctggttaaagactacagtttagtgtaccaggtattataaaaggctggtcctgtagatgcttccttttgataaaactggagccaccctggccatgaatcacaagagtgagaactttaccaaaaggcatgtattattagaaaatgtttattgtagcactgtttataacaatgggtgctcaaatacacgccagcagtaaattcaatgaaccaagtgtggtgtaacataataacataataacaagagaataaacagctatagtcacataccaacatgaggaaagccagttatggaagatgctatgttacatgatcccatttacaggaaatatgcaaagtgaatcaggctaacttataaacatgaaaattagaggtgttaccttcaggaggtacaactggggaacaactggcatgcaggggaacttccttggtcctagacacagttagtgttctgaatgcatgcatgctctttcagccatgttcagtgtgtgctaacacttcataccaagtgtctgtgtgctgttgtacttttgtgcactgtttcaattgaagaatcctttgtcttttggattgtagttttgatgagatggcaaaatatgacctacctgcttcaatttattacattgtgaataaaactggtcaagaacaagtgtattatgtgggtcattctcaaggcaccaccataggtatgtatacaataaagaaggaaaaggcaacatgtctttgaagtgaagtgatgttacacaagaatgatgttactttgaatacagtttttttttttatgccaagcagaaaacatgaacagaccacgaaaatttcagtagtaatctacagaaattcagaattttagtgtaagttgttaagtgtcttaaaatcgaaagaactgatgtaagctatatttgttatgtgttttctagtgtaagcaacatagggaggtgagagggtgacattgcctaatgtcagaaacctcaaagggtcagtaagaaaatatactttaaatcttcagtgctggggtgcagctcggtgtggagtgcttgcctaacaggtttgaaccccaggatcaaaccctagcaccacccaaaataaataaatcagtaattaaagaaataaagttaagggagacataactaactacaagatgacagtttatactgtcactaacaactttgtgttcatggcacgtgatcggcgtagagtacactctgcaaagagattcaccaagtgaacagtataagtgattttcagagtattaacatgttaaattgcctcaccctccagaaaatggagctgcatgttctttatttccattatttcttttatgactaggtgacttgtctaaagtccattgtttctaaagtgtcctagagacaagtagcatggggagatctgagagaagtgtaaaagatattttacagtgagggaagtctaaatgtggcttttgagttactggtgttctgcttggatggtctgcaaattagagataggaaggggaggtagaagtgtggggtggagctctaaagattcacattgccatgggaacagggaagactttctttactctcttaccctggacctctttccatgcatattgtaggctgaaatctggacctaaattccttgtttctgagccagaatgtcttaagagctctgttcagctattcaacttgtgtggtgttgggcttcccctgtagggttcaatgggtgacccccttctgtttttttgaggaagtactagaaggtctaattctttcttttgccccacaggttttatagcattttcacagatacctgagctggcaaagaagattaaaatgttttttgccttggcccctgtggtgtttctcaatttcgccttgagccctgtgatcaagatttcaaagtggccagaagttattattgaggtacttgggtctcacccatctcccttctcctcacatatcctcttctgagctgaaaaactggtcacatgagaatcggcagtgtcctctgtagatggtattactggagcagtgggtgtgcttgccttcacacctcctcctgcaagaggcacccagggaaccaaattaactagacacgtagctgcatgtattcatagttagcagcttagttcaggtccctacacactacacaaagaaggtactaggaaggttttgaaaaagtaacttaagcattcctagagttgcttttcatccacaggcaagtaggtacacaggagtagacaggagataagagacaagaggtatactgtttctgtgtgcctgtccctagccatgctgaaaatgatctaaggaattatttggcccctaagcatatcagtgcttagccctagagctattcaattctaaacttcattccaaggagcaacagcactgatgaggagtttaagctcattaagaatggacagtcatttatttcagtgttatatattttataaacacacacacacacacacacacacacacacacacacacacacacacacactgaatacagtgttatatacagtcatatgccatgtatgttttttgattatttagttgtgaccttaacttttaatagctgagccatatttccagccctgtaatgtttctctttttttgtttttgtttttttattttttttcagatatttttatttgaattagaaacaggattgttttacatgataatcctagttcccttctccctcccgtcctcacctaccacccttcccccaactaaaaccctacctatcacatatcctttctgctccccctggctggtgaggccttccatagggtgtcatcagagtctattgtatcctttgggatagggcctaggccaacccccgtgtgtcttgtctcagggagtatccctctatatggaatgggctcccaaaatccacacctatgttagggataagtactgaactactacaggaggtcccatagatttctgaggtttcctcactgaaacccatgttcctggggtctagatcagtcccataatggtatcccagctatcagtctggggagcaagagttccccgatgttcaggttagctgtttctgtgggtttcaccagcctggtctggacccctttgctcttcagtcgtctttctctgcatctggattccagttcagttcggtgattagctgtgggtgtcggcttctacttccaccagctgctgcatgagggctatcgggtggcatataagtcagtcatcaatctcattatcaggggagggcatttaaggtagcctctcctctgttgcttagattgttagctggtgtcatctttgtagatctccagacatttccctagtgcctggtttctctgtaaacctaaaatgtcatcctctattatggtatctccattcttgttatcttctattcttcccctgactcaactcaacctttctgctccctaatgtcctccttacccctcctcttcttcccttctcatttcctagctccctccccccttcccatgctcccaatttgctcaggggatcttgaccctttccccttctctaggggaccatgtatatctctcttatggtcctccttgttagcctacaatccacactgccagagaagctagtaaataaggaggaccctaagagagacatacatgtttttgtttttttcgagacagggtttcgctgtgtagctttagagtctgtcctggaacttgctctgtagagtaggctggcctcaaactcatagaagtatgcctgcctctgcctcccgagtgctggaattaaaggcacactcccactgcctgtctggaatgggtttttgacagtgaggagtaatgcactggattttggtcccaacagataacaatgaaactgaaactttcctatcaactagtagtagttcaacatataattcacatatttgtggtgatgttagcatataaaaatctatggttacaagagttatataaaagtataggacaaatagttatgcatagtatttatgtcatagttggctttaactgccaacttgacacagcctagagtcatctgagaaaaaaaaaaagtcctaattgaggaattaccaaaatcacattggcctatggcatgtctctgggagattgtcttgactattaatacaggaagtctcagcccactgtgggcaacattatctctgtgcaagtggtcttaagtgtcagcctgtgaaccagcaagaatctctgtggttcctcccctgatttccctctataatgaaatctaggtctagaattgtgtaaggatactgtgtgatggttgcataaggctaatgttacttgagaatctgagtcttagaacttacccctgctattaagtgactcattacttaggggtaggtgtaacatagctctctgtctctgtctctctcttgaggcataaatctaattaatcttaacaataaaaaccaggagttagatatcagtgtaaaaacttgaaagatctgtgaggcagcagagaagtcacagttgctttccacctcttctgctcctccatccaaaagggcagaaatcctgtctctgccccaacttattgcttctgtctcttctctgtacagacctccagacctctatgattaactactggttagctccaccctctgactccaatcaagctttatgtgttagaacataaaatatcacacaacacttcctcttttctcccaggctgtttaaagtcttttacaggaaagggctcatgcccttaatgagccccttgatgaggtagaaggactataatgttacacttcattgtctttgtaactgcacaggaaattctgggttacaaagagctacagttagtcagactcttgtggtaggaattcattgtatcagcaaacatgccaataaaattttgtttccactgtcttagttactagaagtattgatttgcattacaaatacttcagaaactaccagtacttcctgaatactagggctcctctttaataccatctttagaattactctggtggtcttttcctgtagcccccacatatgaatttatgcacatagagatgctccaagagaaatacatcgttttgtttcaaggcagatggtatccagctatatagattgttctgcagattgtgtatttctcccatggagagctagcctgttagttgatttccttattaactgttgcataggcagcttttgattatgaagatctgctattaattaattgattactgtggtagacttcagactgggggaagagctctagagtggatacaggagagtgtgctggctgctgcaggggaatgcatgttataaatctagcttgctccttagagtttatgagttagttttgtaaaactaaaaactacaccttctcccaccccacccccccctttagaaatgttgttttgtaaaattggagtggagatcagggctctgtgtttttacaaagcattctctatggtttctgatgaagactatgggcatggcatttgggaaaatcatgatttcagacttgaatgctttctggcacacactgggaaagtaaaaacaaaaacaaacttgaacaaaataaccaaatgaacaaatattcataaactgttgaagtaagctgctgtgaaaaatacatgttgcttttgtggaagtaaagtgtccccctctaatactttgaaacaaaatataaaagtgtaatttacaaacatatcaaagttaatgtgatcatgcctacaactatttaaggcaaatccccctttatctgcatatgtcaccatgcgtggatgtggttttctatggagtttgccagaccagtagttgggtcaatggttctgagtcactaggtcaactttatatcctccatcagcccaaaggaatggtggactttgatgtgggcctgctatacatcaccctgctaaatagagaacttcaacaatgcacgcagttgtcacaatgactattatgtagacactaaggcaagagctgtgagtggactagctttccatgtcactcgaccttttctccatgtagaatttacttcctggtccttttaagctacttctcaagtggctgttctgacaaagatcatttagatctgaagtctgctttcagactggatacattgtccaacagaagactgacttcacaatgtgatgcctggtttttatgtacaggctgcagtcatttgggaagagaaaaccccaactgagagatttcccttaccccattggcatgtagacaagcttttgggggcattttctgaattagtgattgatgcagaagagagcagccattgtaggtagtgtcacccctagacaagaggtcctggatgctaaaagaaagcagactgagcaagccatgagggaacaagccagtaaacagtgctctgtcatgacttctgcatcagttcctgcctccatgttcctgcccagtgtgaattcctaccctgctagataatggactgtgatatggactgtaagctgaagtgaaccttgtcttcacctagttgctttgaccatggcattttatcactgtaatagaaatcctaacaaagacagaccgagatcacaggctatctctggatggttaagtttcctggcagaaacctgaatacaatagtatgcatttaaactagtgtgatatttacactgcagatcagataactgccatttttttaacgggaggaaaaaaaagaagctgtgcttctccattctgtggattagtggtgagccaaaacaagaagaacaagtagcagttacctggagtgttgagctcagcatgaacactgggttttgtcaaagttgttggtatttcccagtcatctactcagtgcagagaagcaggctgcatgtgtgtgtgtgcagcctcattcgtgtgtgtttccagcttccctgtgctgccctcctagattccacaggccaatgtgtggcatgtcttgtccttcctgacgctgtgctggtggcttttggccagtttggctgtagaagcatcttcctagtttctgtcttcatcgtcagttgttgttttatctgcatccatgtctatctttgtggctagattcctccccttcaaaggacactaatcatgtcacaggaaggcccaacctctctttcacttgggtcatctgaaaagacccaatctctaaataaggccattctcaaatgttgacacttaagacttaaatgtttgccttttaagtggacataactcaactcataacatttcctttgtagatacttgagttttccattcttgcttgtcttagcgtggctgggttgagcaagagtgcaaagggacagatctgagttccatataaggaggacctgtctcctgttgcatagtacaagaagatctactttgagagtgtagtgaaggtcccggctgtacttgaacctagatccagtgattgttggttagggacaatatagactaaggattggtaagcttcttttataaaaatgggccaagtggtttctgttgactattcctgtctaccaaagccagggataattcataaactcatactgtggctgcattccactaaaacttacgaaaccattgtggtgctttgggcaggggaagtgggaagtaatgaacttgctactggattcagagtaattgtttaatgggtgtagtgcaagggttctgaaagtggatcataggcataattacacaagcgtgactgtgcttgacactgaacagttaaagatggaaatgagaaaccttaagtgttttaccaccatgaaaatatttcttaataaattaacaatagttgttcatggcggttcacacctataatccagcctttgaggcagcaggattctcatgagtttgaggctagcctgggataactatgaggccagccaggactatcccaacaagaccctgttttggaacaaatagtgaacgacctgcaagggggctggatttagccagtagtggattagagggaaacatacttagtccaagcctcaacagctgtttgggaagagaccttcaacagatggtcatctccctttataatagtctagtataaacatacatagctttctgactctgccttttcatttagggaactttagcacatgtctctaagtacatctgatttagcccaggaataactcacaggtttcctgcttggaatgttagttgattgccattgtgtcctggaggccccttgtggagacccttgtatgtctgtacttctaaaggaatattgaggccagcccatcaggttgaaatgctgacccattcttgggtttctttttattttgcaggacttgtttggacacaaacagtttttcccccagagtgctaaactgaaatggctgagcactcacgtttgcaatcgcgttgtcctgaagaagctttgcacaaatgtcttctttcttatatgtggtttcaatgagaagaatttaaatgaggtatgtccattgacattgagacttatctcagctgtcagttattagctctggatgtgcttatttgtttgagggatatggacctggacccatcagacattcgagtctttcatttaagaacaaaaccatcagctttatcaagtggtacctctgttgctgcctctgggctcactcctatgagcttctgacactacctataaaggaacaaataatgcatggatccatcacaagtcataatatttatataacatttattctagtagtgtgctctattcaaaaagctatgtgtgtttaaacctggagcatcatatgcatatagacacagagatacatactacatgcattagcatatatttgtccatgcacatgtatttatgtctgttatgaagtgtaaatctctggcttacagtatgcctgtgtttctaaatgtatttatattttaggatgttgaattctgaagacaggttttaaaaatctggagtgaaggcaggcatgctggtgcaaggaggggtttgctgaggcaggaggatcttagttcaagtttgagttatctagtcagatcctgccctcccccattttctataaatgaaggtggtagagacttttaaaaagtgagatttttatttttgtcccattgattaaaggaagactttaaatttctaaagtctggaaatttaggaaagcatgaagaagaggaaaaatgacccgtgattgcagcctgtatgtacctccttgatttacctcactgttgcttttccctactctgcaggtgtctgagagatcagtattctaaaaaactgtgcatagatttgtattattttgttctttgaagaggaaaatgtgttaatggggatttattaatgctgttttcattttctcactcatcacattcgtctttcagtctagagtgaatgtgtatacatcacactctcctgcgggaacctcggtgcaaaacttacgacactggggccaggtaagcatgccagggggacagctggacacatgtaaggtcaatattgagtaaaactggtactggctaagctgtggattcccagagtagtcttcttcatgccgttcccaaaccaaaacagcaggtcaaatctgtttcctttctacagtcctgggcgcttgtccctgagttggggcactttagttatcttccgtgatatacactgtgttgggcgaaggctcacctcgcagtgatcagggctgagttttgttttcctctctcttcacttctttctcctttgcttccatctcagatttatgtccctttcctattcaccttcccactttcctccctattttttattgtgcaacagatttactttatttcatatttgataaaatatgattttctgggggtagaagctgtcagcacccatggacagtgtgcctggaacacgagtggataaaccagggccaaagtgatcatctatgataatggggggtcactaatgttcaagtagaattttgatcattttatcacataagcaatgtatgttagttctaaagcatttagagttcacatgtagataaaaaagaatagtgtcttaaaatggaaatgaaattattctagtaatcccatacaggtagtaagtacacatttgaggcaggaaaagtctccgtatttgcttggtgcctcttgctgaatcatttcaaaaagaagtagttataggtagaatatttgatgtaaaaggagattatgttttcccttctaatggctttataacttgcttccccttttccacttgacaatagggaggatttacttccaccttacagcattgtcttgagaatggtcttttccagctaaccttatcctaaacgtgaaatgctttgctggttaagcttcaaaccaagatgctctaaaggtgttttagcttctgagcactgcacagacacaacttgcaccagaaacactgtgttcctaaagggttacatctttttttttttttttttttttttggtttttcaagtcagggtttctctgtgtagctttggagcctatcctggcactctctctagagaccagactggcctcaaactcacagagatcctcctgcctctgcctcccgagtgctgggattaaaggcatgtgcaaccaacacccagcagggttacatcttttaataaattattctttcaataaaaaataaggcgtaggctggcagaactggctatacacactgacgtttaataatgagaagtatggggctaggaggtgattcagtggacaaaggcacttgccgccaagcctgatgacccaagtttgatccctaggatctacaagttccgaggacagaatgaactccaacttgtcctctgacctctctgtgtgtactgtgcttgcatgcatgcgcactcaagcatgcacacgcatgtgcccgagcacacacactcatacacacatgcataccatacataaataaactgaaataagtaagatattttaaaaaaacaaaatgaaacctatgagtcagcaaggtggctcagctaaagtacttgctgtggaagccagactacatgtgctcaatccccagaactcataaaggtagaaagagaggaccaacttcacaaagagttgtcctctgttcttcacacgtgcatgtacttcctccatcatggtcatgcaagaatagtaaataaaaacttgaaaaaaataaaacagactcctgtgtccatagagattccaaatcatttgcactggagtgtagcatgagttctaattagtcttagtaataaaaactcagagtcagatattagggagtgaaagctgaaagatcagaggagcagagcagccagacagtagagttcttatctccaccataggctcagaccgagaaagggcggagtagctcctgtctcctcccaccttatattcctctctctgcccagccctatcacttactgttttctcctccctaatgctgggattaaaggtgtgagatcccgaatactggaatcaaagggctgagatcccaagtgctgggattaaaggtgtgtgccaccacagcctggccttctatgattaactagtggctagtaccacactctaatctccaggcaagctttgttagggcacaaacaaaatatccccacactggagaaactgtactttggctttggctttttatttttgcatttttattgagctatacgtgacatactgctacactgtacaacttgatacactttggcataacctgtaatgcctttgcctcagtatgacaggaaacatacctgccacctccgaaagcgccctcatgttcctgggtaaatccttcctccacaacaactgatctgcgttctctcactttattttgcctttcctagagttcatgtgtaacagtggggtataatataatgtatttgtttggttttgcctggttgttttgttcaatatacctattttgagattatccctgtcaaatgtatgagtagttcagtccttttttatttacaacgatctgtatgtttaggaagtctgccccccacactcttcttccactagccaagtgtgcgagtccctggggcatggcatagaaaactctctgtcttgcctcggagccctagctgaagaagtgtggtctgtgacactggaagacatgacatgagctgctgtctcacaggcttctctttaaggagatgccacttaggttattgatgtgtcaggaaagctaaatgccaggtgacagagtttgctgtgccttaggaagaggggtccccagaatgcgagttgtccatgccatgcttgcagcatacatttaccacttaaactatgctttagaccttgggaagcactcaaattcccaatgcccttcttccaggtccttgctactcacaagtatatttctgtttatgatcatttgttttcttcatatattctcatactaaccccctgccccagacacatgtgaacattttacttctctatttggacatatctcaaaaggccccatttctgtcacctcagaaatcactgcattcccaaagatgtctgccggctggctgaggcacactgaaggcagtttgtgagctacttgacagcttagtggacaccagctgcctttgtgtggtatgacacatgcttcagcaattcacaagtagccactctgccgggcctttcaggggcccttggctgtgttgaaactgtggcttccctgagtccatgctatgtcatcatcatagtagggccttccttcgtcctcagggtcctaggcccccactgggcactgggtttgggagagagcagctggtttggctgtaaccctaacatctgttctgattccagcccctctcgtctgcccctttaagcaactggccagggtcaaagactgcaggctgagggccataacattgctctctagccaagctgactttgtggttttggaatttcccaaattcatgactcagcagagagggcactgtgccctttgaccttctgctcactgcgaggtctctctgtcatacaggagttactttgtacagccatttcccagtgttttcttgttactgctcccctgctgggctctgtggtctggtggcctcagctggtgctcagctcattttcctccctttttcttttgatttagtctggtcagtgggattccacctcagacgagcctttctgcaaacatcctcatagacacagacatgcctagaggtgtctcttagttaattccaaatttagtcgaattgacaatcaaggttataaccatagcagcctccaagccaaatctgacaaacttataccaggtcccactaaccaaacatgttcttgcctctcccctcccctctcccctccccagagcctgggcacttattcctcttggaagaggcctgtcccaacctagctttacagcactagccacactactgaggacactgatgaaatagatttctaggcctctcccacatctatccaggatccgaattctgaatgtgttgctaggatctgcatattaataactccctgagatcatgccaatgccatccactgttcgaaacttcctgctttttgttaaaacaaaaaaagatgtacatttgattaactttttaaaaacagtgctagtaggttgaagtcctaagtgatgctgagctacaagctatttcctacacccctggtgctttatccacatgtatgacgtgtgagaacctggtacactaaagtctgcatactctgtcagtccaggctgcactggggaattagcacgttcaattggagatagaagtggatgtactcacagcagctgtaagtctgtctatatttttctcagtatgttacaacatcaacctctagtctccacacatatgtgagtataacacacacacacacacacacacacacacacacacacacacacacacacacacgtgtatgctcacaaaaatctaagcaaataatgcatatagataggtaggatagacaggaaacacaaccatgtgtttgtacagtcaggcatttcttaaggagaggtttacattttggtaacatttcactaagcaatttcattgttgtttgaacctcttagaacatactgaacacaaactatgataggcataatgtcctttaatggtatagccttaccggaccactgttgaacatatagtaggtgatcccagtctgaaacatcagtatgtatgtacaccttcaagtaaaattactacctctttgaaaaagcccaagaagccaattttagttgaaaacgtccacacagggggctggagagatggctcagaagttaagagcaccgattgctcttccagaggtcctgagttcaattcccagcaaccacatggtggctcacaaccatccattgtgagatctgatgtgcagatatacatggaaggagaatgttgtatacgtaataaataagtaaaaatctaaaaaaaaaaaaaaaaaaaaagaaagaaaagaaaacgtccacacagatgctcatctcatgggggtaactcttttggtcatagctgttttcccagccattctgtcagaaagaggccagcctggtctacaaagtgagtcccaggacaggattgtctctatgccccaccaaaattgtgtgtgtgtgtgtgtgtgtgtgtgtgtgtgcgcgtgcgcgtgcgtgcgtgctgcgtgcgtgcgtgcgtgtgcgtgcgtgcggtgtgtgtgtgttgtgtgtgtgtgtgtgtgtgtgtgtgtggtgtgtgtgtgtgttgtgtgtgtgtgtatgtatggtgtgtgtgtgtgtgtgtgtgtgtatgtatgtatggtgtgtgtgtgtgtgtgtgtgtgtgtgtgtgtgtgtgtgtaaagtttggaagtgaagaataaacctggatttggtttttgaggacctgattgtctgtagtaatctatgatattatctctaacttcattgtctgctaactttttttttcctccaaattttcttgtttttagattgctaaacaccatatgtttcaagcttttgactggggaagcaaggccaagaattattttcattacaaccaggtaaaccatttaattaaatgagcttttggcttctagacctcggttgggctcagctgcggagggcgggttgtcagcagaattggcttggtaaggtgctttccctgagtccacttggatctttccaggtctgtcagtggagtggtgcaggtctcctgtcccgatgttttctggctgtaaggggctactggggttcggtaggatcataagcatatgctttagaaccaggatgccctgggctattgccagcttgctggaggtgagaccttagacacattacatggcttaagccctttcttccctctgcaaataaaatttccatttctgagcactgagttccctgaagtatgaaaatatttctgtttttctcaattctcgaagtagcccttgtttttgactttaagtttagagaattgagccatggaggatttgtgtggcttctctcacattcagacagaggatggaggagcctcggagcacagagctccttcttactcagttgggtccttgcatatacatctggggataaccgtggtactcactgaggattaaatggtccctacagtgtggcagaggggaacatctccacagcgacagttctttccttgtaatgactatctgaaaaacataatgaaagtgattatcaaaatgtgtagttttttgtttgcttaatttcagatcagactgacaagacatttatttttcaatggagattgcatttactctatttttaaaaattgtaactattaccaaggtttctattagtcttttttttttttcttatagacttgccctcccgtgtatgacttaaaagacatgcttgtacccactgctttgtggagtggggaccatgactggctggcagaccccagtgacgtcaacatcttgctgactcagatccccaacttggtgtaccacaagcgcctccctgactgggaacatctggattttctctggggtttggatgccccctggaggatgtataacgaaatagtcaatctattgaggaaataccagtgaaaacctgacttgagatatataccctttagtagggcaaaaagatgtttgcttcatttctgtaaaatgcttgtgttttccttgcctagatcttttgttttacatgcaagaagatgatggctttgaaggtatctgtgctctctagttagttagaagcactctagttgtcttatgcttaattatgactaacaagctagcatcacagccagtgatgccttttgaagtctttaaaaggtgtgggtgttatgtgaaaatgtcatcgtaatcattatgttactttttactattgtttttggtgtaagcatgccacttatacatgcgtatgcgtgtgctatgtactggtcagacctgccttgtgtggaggtcagggctagtatcaggatgtcttcttcagacactcatcatcttattttttgaggcagggtctctcactgaacgtggagcttgcatatttcagctagactggctgaccaatgaacctccaggatctgcctgtctctaccttctctctcatcagtgctgggcttataggtacatgatgccccatccagtgtttttactttggttctaggggcataaactcaggttctcatgcttgtggatcaggcactttgcccacaaaaccatctccccaacccatctgtaatttaaaagctatgcaattacctttctattcccaccaaacacaagtgagaacgtataggacacttcaagctatcatttttgttagcaaaaacaaatctgtctcttctttgaacgcagtatgaaaaataccttgttctgggcttgacatgggtcctggggagaccaaggcaggaagactgctgctagatttagggcttatctagagagtgaaactttatctcccccccaaaaaaaccaaccaaccaaacaaacaaacaaacaaaaaaccaaagacaaaggaacaacaaaaccaaagtgctcagttctcttttctttgccttagatgctctccagcccagtgttcctgtgtttacctgcctcaacaacatttttcatgtttttatgcactaactacctagtcaaatccagtgttaccccagccttgtcaggaatattctttcttcaagttttaccaaacctcaataacaagtgtttagcaaatattcagattttttaggctaagtcaaagaaaaaaaaaaaagccaagaatcgtgtaaagcagattgtactgaataataataataaaaaatctcttgtaaacaccttgaaggttgatctactcagctgtgtgtgttcatcaggtcacttttctgtgaagaaactccctgtggagggacaaaccactcatttttcagaagggaatgcggttgctgtgatggtgtgtgtgtgaagccaaagttggctgcctgtgacaagtgtcctggttaatttttcacacaaatgaactggatattctcagatcaacgctcagctcaggaattcgattctgaaaaccagtgttgtatgctctatactgtgtgcagaaaacctgcatttgtctgctcgctattgtcagctgaatggctagttgataagttttctgacctagttaccttagatgcagcaatattacttgatattggctcatacatgcagacagaatgatacaactttgtaacattttaaaggttcgtatttgaacttttcaataaagctcagcctcacaggcctgaacaattatgcggtgctgtttgctttttaatggctagctagcctatactttgttttttcgcaggactcagaattttttttctctactctcattcccccaccccttggaaacctcactcacatggtccatgaataattttcggggagagaaggggatcctgggtcaaaagatggctggggctggtccgtgcacagtctgtgctagagaggctccgaatttaggccaggcaacaatgaagtccttccccaggcagtggctagttagtatctgtcacttccttccttgaacaaatgaagcaaataaagctgacagagacagtccattgccttagtgccccccccaaacccaaacaaaacagttcggagggctcaaactaccatgcacttaagtacagaggccataccagtcgttcatctttgggtactcacaagggagtctttattgtagttactatgtgcggactgacaagatgggcacatgttttgatttagacaaatgaagtgacaggtgacacctagggtagctccaaagactgtcacaacctctgtgtggttcttcctggcaccctctgaaaggactaaagtggtcaaagcagtgggtatgcctcctgtagagccaccctcctctctggccacatatccctcaaggatcctttgtccaaggcaaacgggctttgccaatgaaatacagagctgaaaggatgaggcagggagttggaattgctggctgccatttccctgcgtgtggagaccattctagggagggcctaagtttccagctgcagctggtgttaaagggcttctcaggggtccttgagagtgtgtggttagcccagttcctccagatggcaagatgaacagtggtgcacagccgtattttcttcctgtctggtctctgtcttcttttcaaactttgccctggtctaaatgtgcaggtaccacacagctgctcttgtcacactggctttctctgcctgtttgctttcatttgtggtctcttggcctggatgcataagcctttgctgccactactccctgccttcccacacccgccactcagggcaggtgtgggaaggctttgtgtgttccaggcaagggctccactgtgagctgtgttcccaccctcctcagtggtcacttgttccaggcaagggctccactgtgagctgtgttcccaccctcctctatggtcacttgttccaggcaagggctccactgtgaactcttatttccagcctcctttgttgtcaagctaacttaagtttgtcttggtatctgtgagttcagactgctgcctctagaaacactgacagtttggtgaggactccctggggacttttcaactgtctttatcaagtcctctgttgagcacaatacaaagatgtgcacaagcctgtagcttatggaggaggaaaagttaatattcgatcttcttggggttattaccctatagcctttaggctgagatcatctggattaccacctgtctatttatgatccttctctaagatgtagtcttgtgaggaaataaatgaagaatggagaatggaagggaaggaaaaaaaatcacaattctcatccccacaagagggcgcgcttgactttccagcttgttagtctttccagcctgcctactccatactctgtggtttttgttttgagactctctctcactatacccaggctgacctggaacttgcagtcctcctgcctccctttctgaatgctggaactaaaagtttacattaccaaacccagctcctacaacaacttttaggaaagctgtctgtggatgttgggaaccttgttaagtttcttgagccagttggcaatttgataatgggtggggctgtggctgtcataagttatagccaggataatgattaatttttttgtataatgaataacatctgacaatgttctcaaggaatagctgtttcccccagatagaaattgtaaataaaaattgggcatgggccttgggtggataggttgtagaaaaggatttaattgaggcctcacactattaagaagtactaacatttattgatttcattgtcaaacaatgaagattattttgtgctttgtccacaatggaccactaaagatgctgattccgtaaatggagacatttaaaatagacagtagttggattttttgtcataaaaaaagatctgtttttattctgtgtccgagtgttttgcttgcacattttaagtgcatcacatgtgtttagtgcccaaggaggccagaagagggcatcagataccctgaaaccagagttggaggcagctgtaagtggttacgtgagtacagacatcttcaagagcacccagtgccctttaacgctgggcaatctctccagcccctgtcatttattctttaatacattttatacaattataattagtagatttttaagactagaagccactctgttttcctgtaatgcaggaacagcagctaaagggaataattattctgatgaaaaattgccagtcacagtatttgttgtattgtgttaggttcagctttcaagtctaattccaaactagccaaatgaaaccttttgtgtcaattacactacaaaaatgtacttggcatggtttaagctatgtgtgctggagttttgaagccttctcctaaagctttgatcatgttggcaacctatttgatggggaaggagtacagggttggtaatattgtctctctttacaggcatggtatgccttttgaataggaacaactgtatatgtctgactgcttcagagagaccgataatagttccaacagaatggacagcactgacttacacaccacatggtaaattgaaaccatatgaatcagcctaggctatcaggggcatcaagggagttctgagggtgggaagagctaacatcccctggttcttcattagcatctcctaccattgtctattgtttatcaaggttaattaatggtccctgattcttttgagaattattacataaaagcagtttcattgttactcttgagagcaatcctggctaaggactggctgactctggattcagctgtaatctactctttgccctacctattcttaacacagctgagactgaatctttaattctccgtcttcaaactgtgagctcatatttggatcgttgaggtcatcccacctctttgggtcttgcctttactctctgatatccaaggagagctgtttcagtcagatagctgtacaaattattccacttggaatgaaaagaaaccaccaacctcatttttaaaaagaaggtatcattagcatcagactttgctagctacatactctcttggcaggactagcccaaggcttttggtgagttggtaccaaataatagttgagactgagttaactatgttcagactccaagaatatctggaggaggaaggattcttgtcctggaaggctgtcagagggctctggtcaggataaaaatgataaagaggaagtctaaatcaaatggaaaattacaagacatagtgtggccaaagctgtgacatcacaaaacacccattcatgtgggcaaatgtccctgaacataagacccaaactgcatctactggtgttccacaataaatatataaaaataaataagtatagaaatatagaaacctactgtcatcttcaaatttgagttgatatcttctaaaatgaacatgcagaatcttttgagcatttttatgtacgggatactctgcttaggatgggagggagttggaggtcagtgacaaagtgagtgcttggtatgccttggactccaggttcctctgcagttcacatggagatgaggggttggaagaaggtggaggaggaggaagaggagagaacaatctagaaaaagtgatcaatgggaccggtgtttcctgattttgtgggaataattcctaggatccttaaagggtctactcacttagaaaccattgtatttttgagtctgcagaaagtgcacaatgaatatgcttggcaaattgaaataaactctccacttaccaaatgccacgtaggactcaacttggttctggttcattaagttctgcttagtcatctgttatattatgcctgcttccttggcatcagactgtgaagactttaaccaagagactccttgagatggttgcatctctacgttggacacaaatatctgtcctgcgagcttcatgtgcagggactgcagaaggacagctgttcttcagcatgccttgagttgcagggacacggggacagggcattctgtagatctggctcccaggttttgctttacaaggtttgatgctataagcatgtggagaccaataatggactgaaatggaatgagcatgagttggtttggaagcactaagtcttgacagcacagatattagttgaatacaaaccaagcaataccactcaccttttacagtgtacaagcagacccaacacatccaagcatggaaggcagaatagaagcaaagagcaatgtgtccctgagggaacctggataagccttctgaacataacacatttgtaactctgagatagtaagttctgatggtccctttagaactataagtggccaaacgtgaaggaggagttttatccattttttttctttccaaaaaactgcaaaccttcctctcttctctgaaaggtgtatcaagggaaagaccacatttttcagggacaggaaagaagaaactttctaagttgccctgaaagtgaagatgggaacaacatgggtatggagaggaattaaggagtctgttactgtctagatggaagaaacccatcaatagggaggctagagccctgcatcctcctaacctctccttttgttactgcttccaattttaaagcttggaaacacacacacacacacacacacacacacagagagagagagagagagagagtcctctttctttttgtgctttgcttgtcaagaagctcaaagctacttcttacaccatctcatcaatggcagatataccagtagggcatagtaacattttgctgtttgcttttcccttccttccttccttccttccttccttccttccttccttccttcctgccttcctgccttcctgccttcctgccttcctgccttcctgccttcctgccttcctgccttcctgccttcctgccttcctctctccctccccctctctctctgtctcttatttttgaggactttgttgagtttatagatttttctttaaaacattagcatagtaggcattagatattatggtggtgttttctaacaaagtgtattttagtagattccttctcatctccccatttctttacctcctaaatctccttgtaattttccccagtcttcttttcctgtcttcatatcacatatgtccctttgccctccacacccttctcagcagctcttttaccctcttttggtatccttcctaggtttttagactttaccttcatttatccccatttacacacacacacacacacacacacacacacacacacacacaccacacactgcaaattaggaaccatatatgagggaaaacatgtagttgctatcttctgaatttgcatcgccttgtttaatattatactgtctaggtccatccatccatactcttgcaaattccaaaatttaatttttctttacagctgaatccaattccattgtgactatagaccacattttcattattcatttatctgttgatggacatccaggctggttccatgtctttgctattgtggatagagtagcaatgcacatagatagacaggtgtttctgtggtagtgttagggaaataacatgccttactagtgagaaatcactccatatacttggaaattaaggaagatccagactccaagagaagcttttcttagcttatatactattaggcatatgcattttaaacacactgtcatacttaaatctctttcaagtctggcccccggttagacttcaaacaacttaaagattcctgcaaatccagcaaattcttaggctgaagtaagacagtattgtacattttcaaacagttgttgctaagggttatcttgccccccaggcagaactatgctttccctgatgagagcatagaggatgtaatgggagaccagaacttactggtggttgtgtccttacactcccactagaagctgtcctttagaggtatgtctttggtaagggaatcgggacttgatgactggtcataagtcagccagctgtctcctttgtcatgggaaccagagcctaatggctggtcagtcctgatgagtgaatatttatattctagcatcctaaacttcccttatcgcttgtaggtctgtttagcagactacttatctttggagtattttgaaggcagcactcctttagctaaattccacttgtgtgattcaatcttcaaagaagattattagtaagtcctttaaaatacgaattctaccagtttgtgtttcttttacatcaataggatatggatggtatatagccaggagtgcatgggtaatatggtagttttgttttgttttgagacaactccacactgatttctgttgcttgagttttctgtcccaccagatcctgctgtcctttagccccacataaacacacagacacgatattaactataaaactgttggctgatggctaaggcttcttattggctagctctctcttaattattaacccattttttttattaatctaagtatttctgcagggtcttggcttactggagaatgcccagacctgctgttcctttggtggctacatggcatcctctgcccaccttctctgcctacctttcccagaattctcctcgtctcctaatcccacctatctttctgcctctattggccaaacattattttattcatcaaccaataagagaaacaaatatacagaaggacatcttcaatcaaatttccataatagttgtaataggttttataaaattatattatgtttactttttttttgaggcttctgtaaggctggaagcttcagtttcgagaccctaaagaatgagtgaagaatgggcatattccttcatcaatgataactctgggacatatagcaaatgggaagtctgaattatgaacttgcctattgtgtatgcatatcatatatgtatgtatatcatacacatgcacacataaatatatgtatatataacgtgaacctgtttataataacacacacattttctggttatatgttaggcccatttattgttttgtatttttacactatgtgtttgttccttataatatatccttttatcttttcttcttgaaagaaatcttactatttcaaatatcctagttgttacctgtgaagtacaaaattaaaatgatgtgtagcctatttcctctcattgtgtgtgttaagcccttagatcgagggttgtgaagtcacagtaatggaaacattgcatccttcctgatagaggtgggagccagctctggaggaatgtggaatcacaagtaagactcttaggggttcctggcagggagtcagtggagacagaagtccacttgtccttcagagcttacagcaggctcttagggccatttatggctgttttcccttggaaaataacacaggaaaatgcaagcttgcgcaagactatgtcagcttccagaagagaaggcctggcttaaggacactacacaagaaggaaaaactagtaaaatggccccagtttcctctggggtctcttgtgccacattttagctacctaggggaaatgcagaggcaggtttctgtgctggactccccgagggctcttccaggacacagcactgtcctccagtgctcagtctctggccctacagctccaccatctgaaagggtgttgaggagttgaggagtaggaaaaaaattgagggctgggcaaaagtcaaagcctaagggacctccaaagaaatggcaggggagatgggacattccccgcacttatcaggcttccggggaggctgtaggattgcatagatcactacttccacccggctttgagctgcattgacccaaacaagggaccctcggtgggtgttaaggctagcatcctcagttctccatcccagagcgaaggctggcagtgatgcctcctcttaggacttcttacaggttctggtccctgtacaaggcagcccgttttcaagtggaggggaggacggtttgtactaaccagagcctggctgttcctttctggagcctctgcggggggagggggactccgggttccctttttgtaaaggagtctatcgctgtttgcagcgcatccattaaatgcactggtgaggtgcgcacacccacagatctccaagaatatagacatacgtcttgacacagtcactacggacatttaaaaactctgaattcggctttggttgcgaaacaggactttctgatggtgatgaacacactactttgcagcggtgatggcgagtgaattatccttagccagaattgctcactcctctgtccacagtaagtcggttgaaaagtgagcaaacagttccgtaggcctggggaccggctcgaagtgcagctgcacgcatgtatgcggatgaggcgatttgatgcagctgagatcagggcagagccatctaacctaacgaaaaactttgggttatctaagcaagattctgtagcggggaaggaagggaagggcagctgacatcattgggggcggggccgcagtcctaagaaaagtcggcgggactggggggactgcaactgtggggtgcagtctcagcatgggctaccacaaccgctcggagctccaagacctgggctgctccagccagctgctcctacagcccctctgggacacgctgaggaccggggaggcatttgcgcgctcaccctttttcccggtcatcttttccatcatcacttacgtgggcttctgcctgccattcgtggtactggatgtcctatgtccctgggtgcccatgctacgacgctacaagatccacccggacttctcgccgtccgcgaagcagctgctgccctgcctggggcagacgctctaccagcacctcgtgttcgtgttcccggtgacgctgctacactgggctcgcagcccggcgctcctgccgccagaggccccggagttcttgcagctcctgagccacgtcctgatctgcctgctgctcttcgacactgagatcttcgcgtggcacctcctgcatcataaggtgccctggctgtaccgcgccttccacaaggtgcatcaccagaacgcatcttccttcgcgctggccacgcaatacatgagcgtctgggagctgttgtcgctgaccttcttcgacgtgctgaatgtggcgctgctgcagtgtcacccactcaccatccttacctttcacgtggttaacatctggctgtcggtggaggaccactcaggctacgacttcccgtggtccactcacagactcgtgccctttggctggtatgggggtgtggctcatcacgacctgcatcactctcagtttaactgcaactttgctccgtacttcacacactgggacaaaatgctgggcaccctgcgttcctcaggctccccagagctgtgcactttacatttgacccaggaaaagaaacagacttgagttatttttctcagaagcaagtaacttattagtcgacgaacatgatacaatctgatgtgtttctgcaacccgacgaagtaatttatataatgtctgtgtgtcagtttaagtgtagtcttggtatcaaaatccagctcactccaatgtcattaacttcgggacatcagctagacactcagcatgggatatttgaatcattatgatctctagaatgatttgcctgtagagccaagactttcctaggtctgaaatcacactgaaactgggctaagcacatatgttggtgcaaggcctgatttctgactctttaaataattcaacttgttcctgctgggcggtgactaaggttatagtattttttctattttattgagtgaaatgatttatttatattgaaagaattttgtttgtactttaaaaataaaaaaagaacattaacaaaacaagcactggttcctgttgcatctgacggatgaaatctaaaaaggaaggggggatactcagtattctttgaagcatcttgagccctgtcatgtaaagaggaatctggtggtaggtgtttgggggagggaaagaatttagggaagaaggaaggtgttgtctggctgctatgattcagaatgatttttagctgtttttgctttttttcataagaagcacatgatagactcattctgtgtattatatttatatatacagacattgcattgtggagtggtacgtctggggcaagttagagtcagagcagcagggcaatcgatgccttgttatcagggcactgacaggtcaagtttgtgcattagagaagctgatcatttctgggcagtgtccattcttagctagtacaactgacccttataacaaggtcccctggagattttgtatagtttattttcttaatgaagacatacatggaatgtatacggtccttccttgacaaagagtaagagtagtatttggtcttagaccccatgtttcttcatccataaaaggagatggtatgcagattgcatgtgaaaatcaatatcctttcactagccacgctgatgtcaccgtcagccatcccacctacctgctgcttagttactttaatgttaaattgaggacatagtttacatgggctaaagttaaagtggcagatgtcagaagtctgtaactctgcacgtaattgtgggctcatcatgtatgaacctaaatgatttcatttaagggtttaaagaatcatctaaagatctggtctccattgtctgccaaaggagattcctgggaaatagctctaagtcttcccagtgattggcagtatacaattgagttacctggctgactttctcctgttcactcagatgtgttttcctgacttctgtactcaagttagtgcctcctttatctgcaggcggggacataacgatctcacttatttataaaaagtgaacttcccagaaagaggaagagagatcccggggaaggggctgtaataaatatgcttcaccattgggaaatgataatcaggcagatgtagaatctttggtgcagctgttagttactgtgaaggctccagctatcccaaagccacaataatctgtctctggtcactgtcagtgtctgtaacaatgtagtatcatgtcatcttgcccttaagggaagtgagatgaggcaattgtacacatggaaagtgttggggaaacactttctccaagtcctcttcagtgacccatggaggaagatgaaggatttttcagttaggtgaaaggctacatgacaaagacaaacaggttgtatttgtatattttttttcacattttatttcacttgctctttgaggtctcctcctcatcaccaggatctcacattgtagatggagaattgatcccacacaaggttagtatctttttcccagtaggagtgaaataggcattgggatattcttaataaggaaattcaatgagatggctttctatctccttagttggcttgtgtttattatggtgtgagtatgagcgtgtgtgtgtgtatgtgtgtgtgtgtgtgtgttcttaaccttcatcctagaaaatgattcttgattgacattagtgaggtttctctaaagcatttacttcctaattttctggctgtttcctttcagtggatccttatcaatcacagcaagaaagcaagctgcaggcacttttttttaaagtctgtattgcgtgcaacaagggtcttcctcccacctcctgatgaccctgaaaatctactaatgacgttatagcatatacacatgcatacatacatactatttatatgtgtatatatacaaaatatatagtctgtatatcattatgcatacatgtactatatacacaaattatacagatgtctacacatgattacatatgtataaatgcatgcatctgtatactatgtatgtatatatgtgctataaatgaacacattgtatatattataaatctattatatgctatatgaatatatatgcatgcatgtataagtcatgctatatatagatactatatacgcaaacatatactatgtatgtgtatatctatacaaaccatatctaaacacacacatacagtctatctatatctatctatctatctatctatctatctatctatctatatactatatatactatatatctatgagtatatatatatatatatatatatatatatatatatattctgctctttcttccctttctctttcctccctctcttttatacaaacacatacacagccatttttattatgttcactaattgtctcctcccccagaatgacacttgtttcttgatacatattggttaaatgttacatggaaagcacaggaaacacagcttgggtatcaatcatgtcttccttcttctatttctttttgttcttcatcttccatcaccagtccaactcagctttttactcaggccatgctcatatttcacagtcctgttctagagaaggtaacaagtttctggagaagtgtcagataagtattattcagctaatttaatgtggtaagcactagcacgctgctaagtgatgccaaagaaagggaggcattgaacccaaattgtggagcctctctgagttcaaaaatcaggaatgtaggcataactgataactagtgggagatagacaattgttgtggtgatatattatttatgttttattaaagctttcctgagggtacagaaagcaaagccgcccacaagctatagagccaggactcaagagacaagcaggtggatctctgttagttcaaggtcacactgagctacatgaaattgatccagtcctaaagagaaacagctcacacaaaggtgatctcagcacttgggatcacaagcctttagtcctaatgctagggaggtgtaaaagggaaaagcaaagggtctccagtcacattgaggggaggcaacagtctaggattgcagtctgaagattcacagagctttcagtctgtgatagagttaagagttaatgattagctttgcttctctgatcttcagcttgaagtgtgaatcccaatgtctatctgtgggtcttttatttttcatgtttcaagttgtaaaatcagagagaaatgaggaaacttgacatactgaaaatgtagtaagaagctcaaagcctggaatgagtcatataggaactttaaggcatatttgtagcaaggcttccaggggctggagttggggtccagcaggcagagtttatcttacctcttcataagccatcaaacttctcagggctatgtccacttgctcatgtcacaggggttgtgagagaacacaggtaaaatagatcagaagcatagatcttgctaggtatgctgacacattttaagggaaggagaaatgtgtttctctatgtgtaagatgataactggcagcagagaattgtggtacttatctgagttaggaggtccagacatctgtcttgattccaggcctggctccactgcatggccactgtgtaaccagggtgaatgctccagggctcaacttcctcatctgtaaaagagatgtggtagttactctttttttgttgctatgacaaagtaccatgacccaaagcaacttatgcaagagtttattttggcttatggctccagaagaagagtccatcatgacaggggaagcatagcggcaggtgataggagctgagagatcacatctctgtctatacacaggaaagagaacaccaacagtaagtgagatgagactataaacactaaaagcctgacctcagtgacataatacaaaaaacatcaaggacagtttattttgttcgtgtgctcttggagggggtggccttcactggagggtggtttacccaccaggggctgtaccctcaaagaaaaccgactctccctcttctagccacaatcaactgctgacagatccttagccaaggctgggacttagtgtctacctctcctttccattttggaattttgtctggcctaaactcatgctggccttgtgtatgttgtctcaactgccttgaattcatgtgtgtaacttctctgctgtgcccagaaagcattgttttcttgcagtcatccatcacatttggcttttacaatctttctgccctatcttcacctaagatcggaggcttgggtggaggatgggtatgatatagatactgttgagcatttggcagtatcttattctctataccttgatcatatgtgggtctttatagtaattgccatctgctccaaaaaggttgagcaatcattttctctactgcaggaaaagtctgtgaaagaaagagcatgcctcctatcttttattccttccaggatcttactcttggaaagtgctctctggctctctcagagcttgggccacaggcctgggagactaagcctgtggttgagctcctgatgatttgctttcagtgaagtgattaaatcacccattggtttctatctctgtgaagtaggtggaaggtagagcagcaagaagcagtcttcactgcttcctaatgcttccgtgaagatggaacgaggcaaagcagtagggagaatgagcgatccaaacttgtctgcagagataatgatctgaaattcccctctccctctatctatccctgacatcacaaggctctgtttttccatccagcagggaaaggaagggttcatgttgtgtagcaatttcctctgaaccgagagacttcacatcctagaagaactctccttaccactaaggaagttacaaattgaaatattccatgtgagtggaggaacaccacaactcccaagtctggggaagcccttgaaacttagaagattcataaatcctttctctttccaagattatataagttgacatgaggagactttcttacttgtggagcttccttaaagtaatacagaacaccagcgttccagctcttaaggagatgtcacccatagtagtgggcttctggtgatgcagatgcttttgagtcattcacattcctacaagtgacttgtcacctatatacagtaaataacccccaaaacctcactggttcagcaagttagacactggtagtattgctaccttggtctcacatcagttccttgtatggagtgagtagacatttgttcatctttctccatgaatggtgtcatacaatgggtaggtactacagaggaccatacctgaaagaggctggatctggggctacatctgatgcctaggctggctagctagagtacttttggaagcaagaggccatgccagtggccagagtgagggtacttcaccaggaggaaggcccattctccttcaagccaagggcagctgcctgctagagaaatgaaccttggcagcaaaaagaatttaaatgcagcctcttagaggtggacattgtgtggacaaagcttactgcgaagttcccgtgggaaggctgttggcaggatacactttggctagaggaagacagttcacgtgctatccccggcaagttaggagaacccataaatgctaaggcccagagatcctattcagtttcctcattttataaataaggaaactggggttcagagacaggaagtgacttattttggtttgcacagatgttctggaacacaaagacctgtgctcatccttccctcccacacgctgggtttccaaaattattgggagctttattttgctgagtgtcaaacaagcagttatggaacactacatagtcattgttgcaatccattttgtttgctaagtttttgattaaactgctgggtcatcatgtagagtcttaaagaagtgcttcagatcaatcttgtcacacatttactcagaaaagttcagtttaaaagagtttaagaaagcattcataagtggaatacctctcagcaataaataggaatgaaagactaatacatgcaattataaggatgagttttaaaatgctgaataaaaagtcatctaccatatatattagattgctccattgacataaaatgccaataaatccactgtgacaaaatagatgtcagctgtttggagacagggaagacttcaaagatactggaaaactttgagggaagatagacacatgtactttcctagttgtaccgatggcttcataggagtatgggtctgtcaagttttccctatttataaatttcaagtattatactttattatatgtcaatcatactaaataatgttgatggtagtggtgatgatgaattaatataaggacctcatgtcataagatttagctttgaagctaaagatatggcagatgacttgataacacacacacacacacacacacacacacacacacacacacacacacacacaaacaccatgcttgcaaacacacacaattcacacacactggtccctgtagccatggttttatcatatgaagttttagttatggccactgctttctaaacctgggctggaaatctaatctatgtgtgaataaacagaacattttctggaaatttaggctatgtaagcaagagaatctaggtgataatgttgagcatattatccatggctcatgaatggtggtactcttatacccaatcaaggaaagatgagtggattttcagggaggacaaaagagagacaaactttcctagaaagagaatgggacaaagttgtgttctgaaaacacttggcaaatctgagtcttgtaatctccaatgggcttcatttctaggccataattctgctgtactttctgtcccaggcttcatgatatccaatgagatcatcacttcttggttgaccaaatgtccttctggttcatgtgtttaagaggatatcatgaaaactctgtggcttccttctgcctttaggttgggggaggactcctttggtgtcaatgaatctaggaggttataagtggtttccatcactggagaatggaaaaccacttcctaagtgctggtcagaactgtggtgacccatgggctaagtaggctaactgactgtgtagttggttgaggccaaacatgaagtgaatgctttgatgatgttttgtggcagcaaaccccatttggatcaactaatctcctaggtgggaaagggtaactattttataacaacttaaatgcagagtaaattcacagttttatgctcagacatgcccaaagtcacttagattcagttcctacttgtaagcccaaaccacttcttcctggtagaacacatctctatttccaaacacatcttgcagataggaggatggtgcctgcagaacatccttgaacattcagctgatgtaacagccacttagcacatagcctgcctttctctgaaggcaatcatcctactcagtgcagcttggtatctgtctgtctgtctccagccgggtcacttctgcttctgtttttgttcattttcatcttgtcttgttctgcagctgagatcaaatcctcccaatatatttgattctctgactcattttacacccaccaattcatctgactcctcacaaatggcacaaagaactctatcagctagtcaccatccaagccgtgatccacgcagtcttgagagatctccgaggccacttctaccctcaccatgcactgctgtcccccagtagttcatcttttctgtgccacatttctctaaattcatagggaaaatgagtccacatccacttggaagattggtctctgcctcttcctttggagacttgcttgtctttctgtgagacaaagatgagttccctcattcaaggaccgtgcattcctaaaaggaagatgtaagtcacctcaagggttcattctgacaggcagctgctgtcatctaactcacccctgatcttaacagaggatcctctgtgactggatttcaggaccacggcagctaatgtttgccagtgagaaaggaagaaactgaacctctgggaaagaagttggcaaaaaaaaaaaaaaaattagtgctacatgtagaccagggatggcttggatttttctggcaggatgatttgaaacccgctgaagggtgactaagagggacttaaaagcaggctgcaggtgtgagtttcagactgagtcctgggaggtagatagtagtcccgaaaccagtggggctagtgatccaggatcagaacttatttattatttgtaccactggtttggcctgtgctagtgaggcttctctatgaccgtgacaccggtgcacagcccagcatcacagacaaccctgggcttgctcacgtctacttctctctccgcaatgggatcccatctggcacagatccacactggccttgtgcatgctgccagcatctctgtgagttcatatgtgtgctggtctttcttgctgtgtttagagagccttgtttcatttgtcccctctggctcttacactctttccacctcctcttccacagggcttcccgagctccaaagggagggatgtgacggagacatcccatttaggactgagtattccaaaatctctcactctctgcgtaatgtccaaagcaatgaccttagggggaaagtgttcattgtgtctcacaaagtattttttttttttacaattaaaacatgtttttatctttctatcatcagattgtacaacttttttttattctgcacttcaatgttctgatcagatattctgtgggttatcttttcactttgatgatgttgtcctttgatgcacaaaagcttgaaaagtttaagttagtggcactgtttgagaaagcttaagaggtgtggtcttcctagagagagcttaaagacataccatttccagtctctctctctctctctctctctctctctctctctctctctctctctctcacacacacacacacacacacacacacacacacattctcactctctctccctccttttctctctctttctgcacccccaccttgtgcttgcaattcaatgtgtgagcctcagcttcttttccagctgccatgcctacctgctcccctcataatgacagatgcttgtccctctggaagtataagctcaaataaactcttacttctgtagtttgccttggtcatgatgttttaccacagcaatagaaaagtagctaattcaacttcccttgcatttacaaagtactttgaagaatgctttcacagataggaatgttcagatacactataaacttgtgaggctggatggatagatagttttatgccttgcaaaaggcagatttggcgtcaaagcatgatgatgataggcaagatatccaagtcagggctaagatcacttgctgttcttcaggagaactggagttcaggacttatcacctatatcagatggcctgcaaccattgtaactctagatccaaggactctaactccctcttttagactccaaggtcatccataacacaacacacacacacacacacacacacacacacacacacacacacacacaaaaagaaaaaactaataaaaagaaatcttaaagagcccaagtccacaaaaaacgaacaaaagtatgaactcctttggactttataaatttcaaggacacctagaacaactgcatggccatttggaagtcaaggagacacaaatcctttgctttctcagatctcaaacctgaatttaagagaacatatcatgacatggaaaacatttaaacttccttaagttatcctagaaattttatactaataagagttgaggatgactaatccagtagaataaagccagcactatacgtaaatttatcctggatctgtcttttctatgatcttttttctcagtcacaagtcttggtataaatagtaaatggcagaacaccaactactgttaattagtagttgcttgaacaagaactttcctcagcataggtagataatacatactccagtgtagatgtgggttctctactgactgaaggacaagagtacaaatggcctagccttttgattgtcactcaactgtattaaggagttctattcatgctcaggcacccacatgtaactaccttcttagagaaatatgtccttacacccacccaagggttgttctctgtgatttccatgttagtatctgtccttgctggaagcataagcactttttgtctaaatgagtgggttgattggaacatatatattaatatacataattaattggtgataacagggcatggtatttcttactttgtttcaatatctaggttcttgagaacaattggataaatttgaaacaagggtctggatgtacattttaattcagtgggaagtggctctgtcctgtatctacaagaagactaagacccatatctcaaaggagactaactatgacagtcaagccagataagattggaacaggttggaacaagagaatacatgtccaggaaattggagaattaatgtttgtgactaaagtattccttctgtggtttgaccttattccaaaacaccttcttcctggtgattatttgagagtgttctctgaatgtcatgatctgctgtgtcaagttcctcccagagcaagcaccttgactgagatcaggcagttgggaaagagtctaatgaaagtaacaccaatcttcactgttttctctgatttatggacatattggatcaagacaagatgggcttgcacacttggttcagtgtctggactgtagaagatcccaggttccatctccagcaaaacaactagagaaagaaaggaaatgggacaggagacaaggaaagctgagctaacagcaaaagaaaagatttagataggcttcctacagcctcctaatgctcttatggtacaagcattgcttttctgaaaagagaactaattttttcttttgcaaaaacccttatgctaaacagcacatactttttgcttttttcacacttctttattttgaggaaatatttattttctgtcttttaaacacctatcagggtcaaatacattggtgctcgtaacttaaatggaggaggtgaatatcctggtttcctagttttaaaaatggaggtaatttgcaatgttttccttggagctaaacaactttaaatttacactagtgacaattgattaaaccaactgagttgctattttgtttttatgtgtatttgataaatgtatatgtaacagctgaagtttatttaaataatttatttagcatttatggttttcaactctatctactgtgtttctttttgtacaacttgaatcagaagtggctaagatgccagtaagggttttcaaagaaaatatgagttcataaatgtttgatgtttcacctaaaagctggtttctaagtctctcctatcacaatggttgctatcacaaagtaaaaaactggagctatgaaaaaagcccttataattttgtgggaagataaattagtacaagtatcatgaacaacactatgaagtctccataaaaacaaacaatgaattctacttaaaatattaaagcaatggtttatcttacctttaaaaagatttggaaaaccttttgaagataaaattttgaaaatgtgtctaactttaagttattggtttagcaattttcttgtcttaattaaaatctaatatggacatgtaacaagacccagaaaactggagtagttatggttgagtgggagggagttgtgcctgccctctttgctgcatccagtgcatcctcagggcaacagcaacaccttcagaacacatcataggacactcaagaaacagcacagaaacagcaaaggcagctggctaaggggatttctaacatttcactgtcaggaatgacgtatttgcccttctgaaatcactataggacacctggaaagaaaaggcaactctggggaaacacactatcttatctctgtgttgtgtggacaagactaagacttgactcatggcaagggttagtatttgctgagtaaataagtatatatttcacagtttacactgaagttacaaagtgtgtagagaccaactcacatagaagagtatgttaaagagaatggctatgggtctatgttcaccccatatcctcacgtttgcctctctggagaaaccctctctatgtttgtgattaatgaggaatggagttggcgagtgtttaatttcaataaagctttccctgacatactaacatcatctggtctggttcatgttgcgttccaaaagttgggcttcatgaatgctcaacttctggtcagtccgagttcttaaacattaggatgtatgagacttactggaggtgagcataaagaacaaagatttgtacgattaaattcagaggttagatccagtagtgggtttagggaagggattagggccagagagtttcaagcaaatagttcacaagtcacaattcaataaatcttgactgcacaagataaaaggcacaggcagttcatcaggcccattgttaaaagaagttcttaaatacactgggagatggttcaaaaatatgtagtaaacaaaatcttctgatgatagtcttgaaagaaatcggttcaagaatgttctgagcaaccatgagatcatttcaggagctataaattagttctgtcacatctcaatgactcagtcatgacatatttgcttcaataacacagactcgacagagctttcttttgtaattgcatatattttaggtaaattgtgatgtttgacctgtgtatacaaagtggaatgaataaatctagagagtgagtatttctttctcctttcatatttatttatttattagtgctaggagactttgagctcttccagtttatgttttattatctctcattctctcttcttttctttctgtgctcaatcatgtcatggtaagcatgtggatggtagaggataaatgagttaataatttcattttaccacgtgagtcctggcagcaagtgccttagcctactgaaccaatatggtagcccatctctcttttatatttttatagaatatttaataaattgttctaaggtgatgtcaccatattgtgttatacaaccatataatatatacaccccttctgactatgtgttggtacctgtgatttgaccttctatttttcctacttcccttcctagtttctagaccactactcacatataaaatcaatgaatattttcagctttcacatgggtaagaacgtgttattcctttttctatgtctggcttacttcatttaacataatatccttcagtaccatctatattgacacaaattatggaaagtttattctttttaaatttaaatttaaaaaaatcttattttgcataccaatcccagttctctttccctccaggcctgccattcccccaccatctccccattccactccccatccactcctcagagaaggggaggcatctcacagcagatcatcaaagtctgtcacatcatttggggcggatcaagcccctccacccctattatgtaggctgagagagtatccctccatagggaataggcgccaaaaagacagttcatgcactagggataaatactggttcaactgccagaggtcccatagattgcccaagccccccaactgacactcacattcaggggacctcgtttggtcttttgcaggttcaccagctgtcagtctggagaccttgagctcctacttgttcaggtcagctgtttctgtgggttccaaacatggtattgaccccttttctgatcacttcttcctctctataactggattccaggagtttgactcagtgcttagctgtgaatctctgcttctgcttccatcagctactggatgggagaggaaggaaagagatacgttgatagagggagctgttatgggcttaatgagaaatgtggcactagggaaattcccagcaatctacaaggatgaccacaaatcactgtagaattcaaccagaaattcaaagaagagctaatacaaatactcctcaaattgttccacacaatagaagcagaagggacattgccaaactctttttacgcggctacaataaccttgatacccaagccacacaaagatacaactaagaaagagaactacagaccaatatccctcatgaacattgatgcaaaaattctcaataaaatactggcaaatcaaacccaagaacacatcagagaaatcatccaccatgatcaagtaggcttcattccagggatgcaaggatgattcaacatatgaaaatccatcaatgtaatccaccatataaacagactgaggaaaaaacacatgattatcttactgaatgccaaaaaatctttgacaaaatctaacaccccttcatgataaaggtcttggagaaatcagggataacaggaacatacctcaacataataaaagcaatatatagcaagccaatagccaacatcaaattaaatggagagaaactcaatgtaattcctctaaaatcaggtacaagacaaggctgtccactctctccatatctcttcaatattgtacttgaagttctagctagagcaataagacaacaaaaggagatcaagggaatataaatcagaaaggaagaagtcaaactctcactatttgcagatgatatgatagtctacataagtaacccgaaaaactccaccagggaactcctacagctgataaacaccttcagcaaagtggcaggatgcaagattaactaaaaaaaatctgtagccctactatataccaatgacacattggtggagaaagaaatcagagaagcatccctgtttacaattgccacaaacaacataaaataccttggggtaacactaaccaaaaaagtgaaagatatgtacagtaagaattttgagtctctaaagaaagaaattaaagaagataccagaaaatggaaatatcttccatgatcttgaataggtaggattaacatagtaaaaatggcaatcttgtaaaaagcaatctactgattcaatgcaatccccatcaaaatcccaacacaattcttcacagacctttaaagaacaattctcaactttatatggagaaacaaaagacccaggatagccaaaacaaccttgtacaataaaggaacttctggaggcaccaccatccctgacttcgagctctattacagagctatagtcctggaaacagcttggtattggcacaaaaatagacaggtagatcaatggaatcaagttgaaaaccctgatattaacccacacacctatgaacacctgatttttgacaaacaatccaaatttatatgatggaacaaagagaatatcttcaacaaatggtgctggcataactggttgcagacatgtagaagactgcagatagacctaagcctatcgccttgcacaaaacttaaatcaaaatggatcaaagacctcatcataaatccagctacactgaacctattagaagacaaagtgggaaatacccttgaattaattggtacaggaggacacttcctgaacattacaccagtagcacagacactgagatttacaattaataaatgggacctcctgaaactgagaagcttctgtttatacagatcttttacctataatagtcagaacttataattaagttagttaggttttctagatatagcgatgtatttgagatggttatgtattcttcaaacctttcaaagacctacagaaatatgtcatttaaatggtttaggatttttcttggcagtgagacacaactgctcctggcacaccaattacgtcagaaagaaagatgggcattgaagaaacttgttatggagtttgctttcaaaatggcaagatagccatttgggcaagaaactgctctttcctggactgttttttgctgtataaactggacatacaagacccacaagaaagtgactgctaaacttacaaaacaagacagtactaaagggttcctgttaaaatggagaagtgtgccagacacactatggcctatgggctgaagatggatgcccaacgttacagaggaactttgggtgactgtccaggtagcgagatgtctgtcaattctagagtttatatattatccttctgtggtctttgatagagttaaagacagatagttatggttatagttttcttcagttattataaaagataagttatccttctttttttttttttagacagaaaagaggagatgatggggaatgtactgtgtatgtttatcttattgattgttaaataaaatactgtttggccagtgaaatgacaagttaggcaggactaggagtcaaagaggattctgggaaatgtagtagagaagtgctgatccaggcaggaagtgacatagcaaggagactcatatttaagcaaagaagaaacaggaagggccctcttttcccctccgctcctgctccagcggcaggatgtgatccactggccaggagggatgccaacaaggcgtcccatcaggtaagtcttataacatatatatatttatgatatttaagactgagctagcggataacaatcctagtcattggccaagcagctttgaacctaatacaagtttctgtgtattcatttgggcctaactcgggcaggcggctggcgtagcggtggggctcaggcagcttttggcagaaatatttattgtaacacaacacctcttcattcctcctggtggcattgggagaggtgtgtcatgtagtataaccttttgtccaatcgtctttactagcagttgttcattgcaatgagtcactggactggttcaagtccatcatcactggaccttcacaaattcctccgagatatcccgctgtcaccctgagtcattgagatccagtcccttcagcagctccagcaggtcctagatggggtagatgttagaatggaccaacccaatgtctagatgtagacctaggtggtagctgagctggtcagtccaggtcactggggacacctgcctcaggtgaggggtcagagccagcttccctaagcccatgccatcagggtcagttctctcttgtctctggtttggggtgaggccatctgtccagagttggggacccagttctcctgtgggagtcaggtcagctttcttgctgtagtatccagcaagaggccgggccagctttccctgggccaaagaagggtgtggccagctcaacatggccttcttgtttcatcaaatatgcttaccatgaattaaaatcaattaattaactaattactcttttagttatgaatgtctttccttcctcttcctcctttttcttcttgttttttgaggcagggtttctttgtgtagccttgactgtcctaggactccctcagtacacctggctgtcctcaaactcaaagacatctgcctgcgtctgccttccaagtgttggcattaaaggtatacaccagcactgctaggttcagctctggcacactgtgataggagtgagggagaaattaacagctggtgttgcttgatgggattgggaagcacgaaaacactgtaaagtcagagatggcagaagagtcaggagtgatgacatctgtcagttcaacaagacttggtgcaggagaaatggatgcaacaatatgtcaatgactgactccaaagacaaatttatcccaggagaaaaccattgtccttctcaggaagacttgagatttatttgttaagtactgttcagaagactgtccatagtgaaagactgttggccataagaaaagccagaagggtgtttctttttgtcatttaattgtagcatcttccagcaatacttcaatagaaaatatgtgtctgtatacatgtttatgtgtgtacatgtgtgatgactgtggccatgtgtgtccatacaccagtgcatttgcgagtgtgtgtgtgtgtgtgtgtgtgtgtgtgtgtgtgtgtgtgtgtgtgtctgtgtctgtgtctgtgtctgtgtctgtgtctgtgtatatgtttgacagggattagatggttgtagatggagttcctgtccagcctggtcccgctgcccttcagtcccaaataaacacactgaagcttatattaattataaattatttggctgatggctcaggcttcttattggctagctctctcttactaattaaccaatctatattaatctgtgtatctccacatagttttggcttactagagaatgttcagggtccagtcttcctggtagctacacggcatctatctaactggcaactcactcctgccttcctctacccagcattctcctagtctggtatccctgcctatacttcctgcttgtctactggtcaatcaacgttttattgaaacatggctaaaataaaaaacaccaatgataacttatgctggagaggatgtggagaaaggggaacattcctccactgctggtgggagtgccaacttgtacagtcaccttggaaatcagtatggtgattcctcaggaaaatgggaatcaatctaccacaagatccagcaattccactcttaggcatatacccaaatgaagcacattcatacaacaaggacgtctgttcaactatgttcatagtagcattatttgtaatagccagaacctggaagcaacctagatgcccctcaactgaagaatggacagagaaaatgtggtacatttacacaatggagtactactcagcgggaaaaaaaacaatggaatcttgaaattagcaggaaaatggatggaactagaagaaaccattctgagcgtggtaacccagtcacaaaaagacaatcatgatatgtactcagtcatatatggattttagatatagagcaaaggattaccagcctgcaatccacaccactagagaatctaggaaacaaggaggaccctaagacagacatatatggtcccctggagaaggggaaagggacaagatatcctgagcaaattgggagcatgaggggaggggagagggatctaggagattgagaaggggaaaagaaaagggttgaggaggacataagggagcaggaaagttgtcctgggggaagaatagaggagagcaaaataagagataccacaagagagagagccattataggtttaaagagaaatcaggcactagggaaatgtccagagatctacaaggatgacaccaactaacaatctaagcaacagtggagaggctaccttaaatgccctcccctgataatgagattgatgactaacttatatgccatcctagaaccttcatccagcagctgatggaagtagaagcagatacccacagctaaacactgaactgaactggaatccagttgcagagaaggaggagtgatgaacaaaggggtcaagaccaggctggtgaaacccacagaaacagctgacctgaataagggggttctcttgttccccagactgatcactgggaaaccagcatggaactgatccaggccccatgaatgtgggtgtcagtgaggaggcctggggaatctatgggacctcttgtagtagatcagcacttatccgtagcataggagtggactttgggagcccatttcacatagagggatactccctcagccttgacacatgggggaggtcctaggccctattgcaaagtatatgacagacactgaagaccttcccttggaaggcctcacccttcctggggagcagaaatggtttgggataagtagagtgttagtgggggccaggggaggaggggaggaatagggaactgggattgacatgtaaaacaatcttgtttctaatttaagtttaaaaaaaagagcaacgcatattcatagcatagagaaggtagagaaggacagacctccgtcagatggttcttatcttttatacacaagagacagcagaaaagcctcttactggttttggatgttggaattttaaactagatacatactcaaaaaaaaaaaaaaaaacaaactgccttactgggtttaagaaattaatcaggattaaaaatatctgcaaggaactgaccaccataaacatgtaaagcaaattaaaaattataataattcatttatgatgaaatacaattaaaatttaagatgtgcaaattggacatggcaaaatagaatacttattaataagaacttagagaatggtatggtttgaatctaaagatctgcctagcacatcatgttttgaactcttggtctccatttggtgatactatatattggaaaactctggaaactttgtggggtctagttggagaaagtgcaagactaggtgtaggtccttggggaaataggtcacaggagcgtggagcatgtccttgggagtttgttattcctgcccactgtcagcctcctggtcttctatgatctgaatggctatcaccacttactggcatcatgaggtaaaggccagaattgctcctgacgtcccgaggcatacaagacagtcaactcacagccaataatcacctggcctcaaatgtcagcagtactgtgttgttgtctttaacatgtcagtgctatgggacttcagagccacagcagggggtgtgaggtcccacttgctttctgtaccttgacagccccatttgacttgtgcactaccggaaattgttttctgcatctgtactctggcatggctacagctttcagtcgagaaagagaacagagggacatacaatttatcctgcttttgccaatcatatcttccaaaagcctcagccgtttcctaccctttccccaccccaccccctgctttcatagcagcctttattacttctcacctttgcttctctcttctcttcctccgcccctttctttctcccttcatgcttctctttccttctcccttttctcatcttccctttataggcctttaccttctgcttaattcaaagtccacttgtttataattttctcaagttgctgagggagccaatgtgttgtggtagttgaacatctgtgtggacatcctggctttcttgttgaaagcaataactgggttgcgatggctatttttcagtatttttattttgggtaaatatcacacaacagtcccccaaggatcagtggaatttttagcagcctctctgcaaacaataaacacaattgtttcttctcttggctaacttcacctgtttcatttttcttagcaagcctctgctttgttgttgcctttggaagtagcactaaaaaccatgcaacagtttcacccaatgccttagtgaggtcccatgaaaacttttggctgcttggcaggctgtggtagtgccatcttgcctgagccgtgatgccagtttctttctttctttctttctttctttctttctttctttctttctttctttttttctttttggtcaaccattagtaagccattgccaggaatgcatctcaaagactattaccatcagctgcctttcaggaaagatcactggagtaatgtgggtggactgggctccattgctcaaggccttgagaacaaaggcagggttctcagagcagaaagaattctgctttaaaaatataaacagagaaattctgtctgaattcccagctatctgtctgacatgcctatttaggattcactaacttatatataaaatccttactatataatctctgtatatatctatgtaggtgtgtgtgtgtatgagagagagagagagagagagagagagagagagagagagagagagagagagcgcaatgtactagtaaacaagagtaaacaagtcatactctatcttttgctaaagtgagacatgttttgttaagtttcttggccatcagtttactggggagggaaacactggctggtgggcgatgcttgctcacatgtgtctcatgaaccagaatcacgacagaatggtttcataggagcagacccacaatcagagttacccaaggtgaactggtgtttcgataaaaaatgggatactcaaatgcctttcctaagaggttttcctttttgcgtctaatgctgaatttcttacctttcccagctgaaggggcaacctttgaaggcctgcatatatatccatcccaccttgacgaaataattattcataagaaagggactcccccgctctctgaattaccagtatgtaactcagcacctgggtgcggcaaacccgcaagaacttgttgaataaatgaaggataaattgctttcttaggtgtcaacatcctaaataaataaacaagccagaatatctgagggtggttttcaggttagcgttctccaagcccactcctggccaaggtatcaatagtgatttgctctgttttcctgttctcactctgaagtccttgtaatggcagggtagtgctctagtactgtagtccttgcctcttgactgtcttgcctccagttcagatttcatcttgccttttctggctgtagccctagttctctctgaagaaatgaacaatagttcctctcttgtagaactgttggaaacaaacaaaaaagaacaggtggtagtctgagttctgacactgaaaggcactagggggtacgcagtaaatgtttttcccctcttccccaccgtgggactgatagcgacagcggattctccggcctagggaagtcagtttacacttgtggataaacatgttcccacttgtacaagagaaggttgaaaccggggattattttctaaaccatatcctgtggagaggcaaatatttatttagcaatctatttagacactcactgagtgcatactttgtagaggacacatcagtcccctaaggacctggtggcaagcaaggagaagttttattttcctctggagcaaatggaaacaatcatcagtaacatgggataatgggaaggtagctgtatttactgatcagaaacgctgttgggagaaactgctgttcagcccagggcactgctaaccagagggaagtgatagtctgggagcagaggattcaaggcagagactgtgcatctccaggtatcttgccagtgtgatgggaaggtggccagcatgggcaacagcaacttggaggaaggccttcaggaaatgggcaccattgaggagatggatgctttggcttgtgatgttttctaagtttactcagcttcgggctgtttgcctgtgcagcatctcttggccgatagtatccaaacagcattcattaagtcacgcctactcccagatcttcctgcccttggctcagcggcagccctagttttgcctgaacgtctgtttggggagggaggagccatacgagtcaagcgttgaaaagacgtttattctctttaaggtttgtgtagctgcggtttcggatgagccagccgtggctcagtcggaagacattcgagctccttctgcaagccatgaaagaatgctcactcctttcgtcacagtgtctgtcacaggcctactgtgggttcctttgtagctgtaggttgtggacctgaggcctcatttgaactcctgaaagcaggcgtattcttattatttgtgtaaatgaaatgtctttgtcaaatttgatagacaattatgtgtccagaggatcaatttttaacaaaacgatttgcagaggtttatctcagatttaaaccagggctttcatgagacatttatttttctttacaatatattttgctactttcttgaaccccaataactctggttaccaatcatactcatggtctaccctagttagcaaaccttttcttaaaaaaaaatctcacttctctatttacggttttccattacacaaagtaaagagccagacatgatttcagagtatgtttcccaaagaacatgactgattgtcagtccccaacgaacagagtcccatgtgccattgctaatatgggaagtaagtagattgcatggctgaatgtctcaaaagctttttaaggcaggggtgtaatctctggcttttgccctggaaaagaaatcaaatttaatatgtttggggggttggaggaatgtgtttggtattgagaactttttaccaggaagcaattggcttcatgtgaagacatttttcttaagcacaaaactggatcacaaattccatgagaacaggatcttaatcttgtttcttgattcatgatgctgggtaatagggttcaatatttgtcaaataaaactgaattccccatcatataacaacttcaactgtgaatcccgattgccaagcatagcaataccttttatttaacaaggtaggacatataatttctaatatgtcagcacccggaacagtgagttattatccagggctttgttacctcattacactgtctctgactgacccacccccttcctactcccctagacccatctcatctctctcattccacaatgaagttctctctattctcagtcttaccaatgtcctacagtctttgtctttgttcttctaatgatccagtcccacagaagtactcatgtttgtggatatagaatatttctttctctttacagttaagtttcctcctttcctttgtccttggagacgaggaatggttgtactcacatacctctgggcccacactaaaggaactaaaaaccatctttattttcaacactgagctgagttcttttcttctgtggtttgtgtcttggtattgtgataaatgttattgttgcttgaccattgttataatggttctcagaaattttgttctcaataatttaattcctttgtctgggtgagtttcaccagcatacactagtagttaataagtagtcaataggaaaaagtaggcttatatagaaaggcaagatatgctcccttgtcctgagccatctcaactgtgttgtgtaacaacagactggagacacagagagaaaacgaaaatgaccacttaatttattccagtcacaaagactcagacttcattgtacttttcttacaaactgaagctaagattccaggtcacataactgcacttggcagaggcttcagggttgtgaagattcacatgaaacataaaatacactttagattttagtcagtgtagatatgtgtccatctttacatgcttgcctgtagggctcagttgagggagctcaccctctctcttttccatcaatatttgatcctttcctccaatttgaaagttttctggattttacttttttcttttctttttgagattatagtataatagttacataagttcccccttccttttcctccattcaaactttcccatatatccctgtttgctttctttcaagttcatagcttcttctttcattaagtattgctatgtgcacctatgtacatgcatatacatttatattcctaaatataacctgctcagtctgtaaaatgatcagccctgaatatacacatataaactttgtttttagtttgagtgtcaataacatttagggtactgttcacctaggctcgttggctcctacacattttgacttgcaggctctccatcaaagttattagtgggaaatttaaacagaaggttggtgcaaatagacccagtggcagacctctaattttcttatctttagcagctaccatgctcccaggctcttaccctggaatcccaggtttccaaagggaaaaaataggtcagacaggctgtgcagcaaaggcaggggaagaacaactacttgctacagaggactaggagctctatgctaattttacatgtcttcttttcctctccactaccacccaaagacaaaggtgttactgagactacactaggaaagtcaagactatgagaaatgctgctatttgcaaatggctatttaacaagtgtgaaagagctcagatccaaacgttggccatccttcctcatccctcctcattccccacagcctttcttctttcattcctattcttcctcttcagtctctggatttgatgctctttagtcatattcattacttcgcacaacataagacagaaatgttcaatattcctcattattggttcatgacctgaacccggccctcatgaatgttccacacttgtgaggagagtgacatgtaagttgctggctacattacagtacatgggctgtaatagaatgtgcaaacacaggtacataacagtgactttcctagttagtcctggggtttgagggtgttaggggaagcttcttccaggtctgatatttaagttgaccctctgtggcaaattcatactttctgttatttctaataatcttaattcattaaggttatgagaatcttgacatctttcattgtctctagtctagctacagagccattattttctaccataagtgtctcttttcattctcccttcacaaaaccactcatattattgaagataaaatttgttttgactcctcctgtcattccaaatacacacctgtagtctcacctggccaaacttttacaattattcactcttaactctttaccactgttcataggttattctagtctccagtgtagttagtgatctctctttgtttttgtctgccaagataaatgttcacaatattgaacaggattgtatatgctgaggcagcaagatattagatccatctttcacatttcatactcatctatcattcagcacaaatccactcatggatgattgctggagatgtgtcagttcttatgatcccctgtccaatgcaatgcataattaaatacagattatatagtcacctataatagtcagaaattatagttatgttaggttttctagatatacaaaatatatttgagatggatattcttcaaaccttccaaagacctacagaatgtatgacatttaaatggtttagggtttttttgtggcagtgagacacaactgttcctggcacaccaattacgtcagaacggaggatgggcatcgaagaaactcaatatgagtttgccttcaacatggcaagattagccatttgggcaagaaactgctcttgcctggactgtttgataaactggacatgcaggacccacagaaagtgactgctgaacttgcaaaacagtacagtttaaaatttcctgcttcatagagaagtctgccagacacactgtggtctataggctgaagatggatgcctcaacattgcagaggaacattgggtgactgtccaggtagcgagatgtctctgtcagatttagagtttatgtattatccttctgtggtctttgatggagttgaagacagatagttatggttatagttttctttagttattataaaagataagctacatataagactttagactcacaaagataggatagatgatagaatattttctttaaatcttgctaaatgttaatgaactaaatattgtaactatagttctaactttataactgttttcttatatattttactatgttaatgttaacaacccttctttttatttagacagaaaagagaagatgatgggggaagtccttctatttatatgtttgtcttattagttgataaataaagcactgttgaccaataggaaagcaagatagttggggctaggagtcaaggaggattctgggaaatgtagtagagacaatagtagccatgtgactgccaggaagacagaacacaggatggcatcttctataagtctataaaatatatagattaataattatggtttataattaagacagagctagcaagtaagaaatcctagtcattggccagtagcacttgtaactaatataggtttctgtgtattattttgggggtcctaatatggtggtaaggctctgtcggctttgcagaaagacattgttacaagttaccatgatcatcttatcaaactgagtcaaattgagttgagtagaaaaagaagaaagatctcgggatgcaaataaaatcctcagttacttaaatcgtttctaagttttcagaatatgtttactgcagaacaccttcctaaattgaacaggtatgtgtaattgtgcaatgagtgcccttcaatttgtcaaatatctcacaagttttcccagaaattcatttcagagccatggacagatggctctctgcctacctgctcctctgccaaaaatactgatcaaattgagaaaggaatactttgtttcttgtttttgctttgttcatttttaaaaagatacaaatactttttagtaattatatcttcattgtaaatttcccttaacaaaatttactgataattacagtattatgcttattcagacttcagattgctttatttgcattctccatcatctctctaagatgataggcatttcccaaaagagtattacttcattattttggtcttattatctctatctccgtttactgccattggacaaacactttttcacttgattttttttaaagataacttcttgagatttcttcgctggcaatgctccataattgattcagaacacactgtgttctcatcctaggttccccacctctttacactactgcacaaaagatgcaatgatgggaatctgctttctttccttttcctttgctcttttgtccctttccctgagaacccttctcttgactttcccagcacaaaccagggatagattaccctaggctcagcacactaaacccaaagtccatttccaccccaactttagtttccaaaagtcctcatcctactaactttcctttctgttgtccacatcatgtcctcttttccctctgagttctgggatgccctcctactgtaagagccattggcggccatcaactgtcttatctagtcagctcttgccagcagcctgcatggctctctcatgtgatccaagtgaattgatttccttaaacatcttcataggttgactttgcagactttattatccccagatattctctctctctctctctctctctctctctctctctctctctctctctctctctttctctctctctgtgtgtgtgtgtgtgtgtttatgagagagattaaaaaaaacttttgttctttgtggatttcattttatgcattctgatctatctctctgttgcctcacgtctgccctttgctcttgcaatctccacccccaaatcaaaaccaaatttaaaagataatcaaaagcaaacaaaacaaagaaacaaaactgtagtatccatctgtagtagtcccatgatgcggcaccaatctgagtggcccaactttggggggctatagtcggatccagccaacttcccctgttcgtccctgagaggtggagtgtggattgaggaatgtcaggtaaagatactaaggaacagacggagacatgggatagaatcaggagggcaatccagtttattcttcaacattcttatataccccaaccaaaaaaagggaaaaatggcaaaagacttctttatcatgatacaaagaagaaacaaactttcttaattctccaaacatttggtaaccatgccttagaccaaatctctcattatctggcctcaagggttaagagtaactacacctcaaaacaagtttctagttatttagataagacatccacaaccaagaccaaacatcctgcagtagccatgccttagacctttaggtcttatgactttaaccttggaagagtaaggagggttttgaactctctgactttaagtcaagatgaatcgaagctatttttacagtccctggaaccaaacaaagaaaaaaaaaaaaacaaaatgaacagaagaagaataattttattgtggaagctgtagtgtggcccactcagtcacatagtttaccctttagtctgttcatttttgttgttgttgtttttggagacaggatttctctgtggctttggaggctgtcctggacctagctcttgtagaccagactggtgtcaaactcacagagatctgcctgcctcagcctcctgagtgctgggattaaaggcgtgcgccaccactgcctggcctagtctgttcatttttacttgcaactattcattgccacaagtcgttgcttttgctcaaggtctctggtttctgccacatcacaaagatcgggctctcactggggctcctcttgaatatcttgtcctgtgtcatggagatcctgctgtttcagatctgtaggatttgtccccttgacctgctccaacagttcataggtgaggtgatggccctggttctgggcctgggtggtagctgggttggtcagcctgccggctttccctcatcattactacccaggcgagctccccagcactatatgggatagcttaccccatgcagtctagagcaaggagctacagtctacagaatggagagaaggccagttctcctcctctggggtcctcagatctgggtccccatgttcacatcactaaggccagctctactgtttcccccaggcaagaagcagggccctctctcctgattgctgtagggggagtatgagtgggtttagctctcctgctctcatgccctcagggctggctcacttgtattctgacaacagggtcagctctcgtgtgctgccaggctgggtgtagggctcactctcctgtgcgctgcagctggtgtggggcagggctagttctctcactcttgtgacccccagggccagatctcttgcccatcacaagcagcaagattccccagacaatcttaagtggctttgaatgccacaggttattcacagagctgcaggtggaatttccagtcctaatgagaggacatagaaaaaagtgttaatgtttcatccatttaaatgcaggcaccttgttgcacaagcaggtagttatataaatcatgacacaacagggtacagttggggcatgctatctggcaatgacctttttatttggttgcaagtttcagtttcccagcaaggcatgttctgccactcacttggtacaaatgagctgaggcacatagccagagggagggagcaggaagcccatacctgcaggaaaaatgaaactcatgccacaggtgatgccagttccttgagctgcctagccagtcactcttcccttctgaacccagattgtaacctgttttcttagactgttgaccaccagccagcttgcaattctggcttaatttgctgaagctgagataacgctttatcacttgcacgtagagtgatggcatctattttagctttgcagggacatactggcagctaaaaaatcttgcttgacttgggagtcagttctgcctcagtaagattagcctcaccagaagtatcatgggtagcttactgtgagatttaccaggcatagattcatagcaggatgtttccatcaccataggatttaattgtagtaacccttattcataaaacgaataacaacatgagcaattgatatttattaacttcctttcatgttccaatcttatgctaagtacttttttttttaacaaggaaagaggatttgttttggttcatgatttgcagataaagtgaatcacagcagggaaagcatgatagttgggcttcattcattggggcaggtgcttgctgtgtggcttgttataccacagatcaggaaggaaagggcttagggctagaagcagcgtcagcatagaatcctcaagcatccctttcctccaagtaatcacatctactggctactttgagaacactttgattggcaaggggggtgtcatttgtaagactcatgcagcaaatacagccagccaccccccccccagtgttgatacttctgttagcatatatatctgtgtctttaattccaagttttggaatttccaagcactgaggcagagagtaatatcttttaaactcaataatgttgcatattaaaagacaagaattagaataactttggagtggctgtgtatcagtagagataaatttgcatgaatgaatgctcctctcttcaatgtggctggagaaccgatgcctcctactgactctgttcttgtcttaaatacctctcatgagtcctgggattaaaggtgtgagctctgttagtcttttagaccgattcaatctgtgtaagcctggggtggtcttgaactcagagagatctatctgcctttatctcctgagtcctgggattaaaggtgtataccaccacctcctagcttctagctgcttggattaaatgtatgtgccaccactgcctgatctctatagcttgaggctgacttggctttctgagtcctcagtcaaactttaataaatcataagtaatatatcactaagtagtctataaaacagagaaagttcataacatttgggtgtaatgtttggcaaagggtgattattaacaagagtgtcactgctaaattggacgatccctaagactatgttgtttggttccattcttggctttaccttttttttattagtgatttattaatattgatgatcaagttagcaaatgtcatgaactcaagaataattcattttcaaaacatcactgtaaaacaaacctctaaccattgaacatgatagaaatgacaactgagctgagagctagatctactctggggtcctaaaggcacacatgcagagtagaggaacttgtgtcttagaaataggatctgtgggtattataataaaaatatttctaaaacgtcatgtgcatgccaacatacttagtgttctcttgggctataagacaaacacaggctctagatctgtttccaactttggttccacattaacaaaagtttgatggatatatcttgtcaggacgaatcttgagaatgtattttgttttccttttatttcttcaaaatcaaactggaagagtcgtgtcagttcttaggtcttcacgtcgtaacaactaactatatgtgtatgtgacaaagtagaaacaggtcataccggaaaaatcacgggcttacctaagcatttttaaaatagctacaacatgctgggaaaatccaaattggaggaacgaggttgaagattggtatctaagtggcaccgttcttgagtggattaagaaagtcattgacgttaggcagctaacttgaagtcttagctttgtgtcttactggttatgtgatgtagagagggtgatttacatcgtcaggtctttcttcaatgtgaagatgaagctgactgcaaaggccgctcatagaattgtgatggtgaagtggtgtcaaagagggttttgtaaattgctgtttccgtttgtgtttgctcctggtatccctgaatgtaattgtttttaccgcatgatcgatgagatctaccccagagcttattcctagtgttattcctcacccttgctgctgtttcagatctagctcatctctcttttcacacaatctccttccttctttgctcctttatttgtcagtttgtataaaacatccacggtttcaaacctgtgaaaggaaattgacctttagccatgctagtgctgatttactcagttccattcagcagaaaccatatttccctgaaattctcttctggagttactagagtcttacttgttaagctgcagtacaatgctgttataaccgtccacagcttctggatgagtagcaggacccagctctcctcattcttaccatgctcactctcctaagatttgatttccttgaagtcatctgacactaaaccagcaagaaattgatctcattcctgctcaaagcagaaactcaggcttactgaggaactggaaccagatcactttctgtctagtaggtttctgaaggaggaatgtgtggggagcttttgaaagcagtgcaaaccgcatgctttgcatgctccatttcatcatttgcagcgtcagcgtcagctcttccctctggataaaatccatcttcgtcccagtgaataaaactatttaccaaagagtgttgtaaaacttaaatgtctgctagagttcataaaatatgggaacactaaagggcaaataaatgtggtcaccttaagatttgttcattacaatgggatcttgaaattcgcaggcaaatggatggaactagaagaaaccatcatgagtgaggtaacccagtcacaaagaagacaaacatggtatgtactcactcatatatggattttagacatagagcaaaggattatcagcctacaatccacatggccagagaagctaagaaacgaggatcctaagagaacatacatagtcccctgcagaagaggaaagggacaagatgtcctgagataattgggagcatggggggaggggagagggagtttggagaaagaaaaggggagaagaggacaggagaggaggacatgagggagcaggaagattgagtcaggggtagaatagaggaaagcaagaaaagagataccataacagagggagttgctataggtttaaagaaaaatctggcactagggaaatgtccagagatctacaaagataaccacagctaacaatctaagcaacagtggagaggctaccttaaatgcccttctctgatagtgagattgatgactaccttatatgccatctagagccttcatccagcagtttatgaaagcagaagctgatacccacaactaaacattgagcctcactcctggaatccagttgcagagagggaggagagatgagcaaaagggtcaagaccagaatggagaaacccacagaaacaactgacctaaacagagaggagctcatgaaccccagactgatagctgggaaaccaacataggacctatccagaccccctgaatgtgggtgtcagttaggaggcctgagcaatctatggcgtctctggtagttgatcagtatttatccctagtacacgaatgaactttgggagccctctccacatagagatatactctctcagcgtagacatatgggggagggcctaggccctgctccaaatgatatagcagactttggggatccccagggaaggcctcacccttcctggggagcagaaaggggctgggatgggggcagggagggggcagggaggaggggagggagagggaactggaattgacatataaaacaagcttgtttctaacttaaataaaaatataaaaagatttgtttgttacataagaagtgaacaattgttaaaatttatgaaccccaaaagatctttccatgaccattctcattcacagagtgagtaaacgtgatttcaagttaacagttcaagaatgcttgaataaagtaagcagcaacaggatttttcctaaggttagaaacatatggaaccctgctgtctattgaaccaattcttgaaattgagaatattgtaaaagttagttaataaaaatcattgttttatatcattgcttaatcttaatttgctataaaaatatccctttataatttcaaagattatcatagtcatttaaatgagtgtataattttgaattcttatttaaagaggagatatggtggcctatgattttatttatagggacaaaaaggggatttccaagtaagggtcagatttaccaaaggaaactaagtcatttatttctttgagaaaaaataaacaattcacttaaatatattttttagagcataatgctatcaaataaggcaatctaagcaaaatacagacattctagttatggtttctttcacagggcaaagaaactaccttggaatctagttatagtggtagttatatgatataaacagtcatatactctctctctctctctgtgtatgtgtgtgtgtgtgtgtgtgtgtgtgtgtgtgtgtgtgtgtgtgttgtgtgcatgcttgtgtctgtgtgtgggcattgagtttatgcatgtaagaatgcatgtgtgtgagtgtgtccatttgtatgtgtgcatgcttgtgtctttatgtgttctgtgcatgtgtgtatgtgagtctgtgtttaaatatttttaacaccaaaatttaaaatgtagaaaaagatagaggaaaacacaatgtcttctttttgcattatcaagaccctaaattgccaaacatccatgacatatgataacttctaactcattgcagcaacattctttttttttttttagcatgggaaggaagttttatttaggggaagggaaggagatagagagagggaagagggaagagaaaagagggagagagggagagagagagagagagagagagagagagagagagagagagagagagacctgcctcctcagagaaatggcaggagagttgtcgcaacattctttggagtgatctgttgccatatctagcaaccaatatagaactagttactctgagaaaaacttcatcttaattgttttaaattactaactagtgaaaaaaaatctcattggacaaactcctaatgacatcactatacccataggtggcacatctctcaaccctcatcagagaggattctttctgcactaaatggtgaataacacagatccacagtgtagattcttgagagagcttgatagagatgccaaaggatgaacatacatccatgaaaaggaaataagcaacccctttaggacctatggtaacagagaaccctaggagtgataactgaatgtgttcatgtatgtgaacacattttggctgattgaggataaaattatttttgaatttagatcaaggagagagaaagattacctatgcgtcacacatatggttgtgtgacttactataaatgtcagatgtgcagctgaaatgtgttctcagcactgctgagcatttacttttcaggtggattcattgcttttcttgttgctataataaaaaacttgaaagcatcagcataaggaatacaatatctatacatacaatggtaaactcatggcgatcagactgctcatcacctcaaacatttatcatctcacagacactgaaatctctgtaaccttacacacctcagttccttctccagctctgaaaaacacagatgtgacagtgccagcttgttctctgctacacatggcgagggacaagccaggcattctccactgctccctgaggactttctaaaccatggctttcctacctaaggaatcaggacaacaatcactggaacaggaaggggagggcaatctcctaagggaaacattaagtgaatgagatcaaggcagtcagcaaccatgtgggcctgggtctaggggacgtttgtgctgaatcaaacttgagagattaaggaagcagaagatgtggaagcaatgacttgggagagatggtggaagcaaaggacaagagaaatgagaacctgaagaaagatataaaagagggattttgctagcatatatacagcgtgttcttttgcctgttttccaactgatttcaattaatccagaaattacccccacagatatgcccagagttcttctaaatcgaacaaagttactggtaactcaagattaagcgttgatgggtgatgtgtttgaaatttagcctttattgtaaaaccatgtgagtaccacaaagcagaagcagatgtgcctgagaattctctggaatgtctttgtacgctgggaaaactagtagttttgtaggagcagatgtacatcagattgcactcttcaaaacactataaaagtgtcttacttttagcagtgacacactcacaagaaagatactagagaaagaaatttacatgatttaaatctatctccagctatcctgtcaaaaccattccagaaatagacacatctaaaatctaaaaggtatcacattgtccttgggattttcttttgctgttgttcataaaatattttgtcttataaattgctgctgtgatgatcctgaccttgttgttttggggaaagactgtgtgggagcgtttggaactagataaggccattgaatgcaaagtgcttagtgaattattgtgggagtttaggagataagcttagaaaaaaacagacaatgggggcctgatatatgaagtttcagagggaatcaaagattttcttgagtgttttgtgtgatattttatattaagaattggtggtgttttctggttgactggggccaaagaatgaactgtgattgacaagggccagtaccacttgactaacaatttttatggtttgctgaaacagtggagtttttgtaccttgagatgaaaagtctgctatgcttttatattatttttagagattagcatcattgaggtgaattttatatatatattatatatatatatatatatatatatatatataatcgtgcttcatgtgcttcatttgcgacaatcatctcagcacacacaaggcaagcaatgctgcatctgaagatagcagctaaatttggcaatgtaccggtatcttccacatgacatcaatgatgaaagcggaaagataagactgagtgagtcatggagaatatctgaagcctggcactatagggcaggatagggttccctgaagaaaggcctagagaggaccttggtgaatcgctgcctcaggcataatgaagaccccagtatgttagagatgacagaaccatcagatgtctgccaaggatagcaactggcgtggagtggagccagcctaagcctatgacagaagccttgtgtgcagagaagcttttgggaacccagaagatcatgagtgagttccatatgccagacaatgtgccagatgagatgaattcacactgctggactcgggtggtacttttatctaattcttcctatgtcttagttctttccttttggaatatgaaagtctgaaatttgtttctgattttacaggaacccactgttaagagactttagatttttaaagaaaccttggactttgaagtgttaaagattttaaagaatgtaggactttaaaagctatactgtattttatattacatgaaaaaaatgagattttgaacaagaaaaggatcatagtctaacaatgatgtaattgtgtgtcacgctgacaaaaggtgggttgtattcattaatatttattatcaagctaacacagcctaaagtcagttggcaagagtaaccctcatctgaagaattgtttcaattatatgctggtctgtggacatgtctgtggaacattgttttgattgttaattgatgtaggagggtttatcccactattggagagatcaacccttatagtagtacttttttgtcaggactaccaggctgaaaataaacctggagacattattaattatgaaagcttagtttaggcttgctcctaactagttcttataacttaaatcaacatatattttaaagtgttaatgttttcccacatggctcattacctcatctctgtactgcccttcctgcttcttccacatccagctggggactttatctttcttcttcctggagttttctctctgacaggaagtctcacctatagtctcctgcctagcagccattcagccttttattaaaccaatcacagtgatacatcttcacacagtgtaaacaaatattccacaaaaatcccctggtgggcctgggttatatatgcaaaccagatgtgtataagtcaatgaataaattaataagaagctctcctctatgacttctgcttgagttcctgcctgacatcgtggtctgatcaataactccttaagttgtttttgtttggaatgttcttacgtaacagaaagcaaatgaggacagaaattgtgctgtttagtctttattgtcaatttggcacaaactacaaaaataagatagtctgattttaaaatggacaaaagatttgaatagacatttctccaaagaatatataaagaaaaacaagaaccatataaaaagatgtccaacactgcctatcatcagggaaaggcaaaccaaaactgagaagtactagagagaggatgcaggcgttaagaacagtggttgctcttccagaggacccaggttagatttccagcattcacacggtcatttactcatctataaccctaagagcactgcaaaatacagtgtacagaagtacaaacaggaaaagcagtcatacacataaaaataaatacatctttaaaaaacataaggagaagtcttctaacccttttaatgactactatcataacccataaaatattaatgggaagggctggaaaggatgttaagtgaatgatgacttcggatgctgtaaaatacagagtgtacagaaagcagaatggagtcgtgtcccccccccccccaaaaaaacccagagtatcatatgaacttgaaatcccacttctgtatatagatctagaaaatttgcaacaggactttgttttgttttacaagatgggatttctctctatagccttggtaggctggcctccaactctgatatctgcctgcctctgcctcccaaagcactgggattgaaggcatataccactgccacaaagatctgaggtaggagcttaaggagatgtttatgtactcattttcactggggcattgtttccaacagggaagattcagatacattcctgaatatccatggccaaagaacccaaccccactccaattatggaacttgagaccctcgtgctaagtgtaattaaagtgtattaccacaagaagtagaattccattctacttacacgagacatctaaaggaagcaaacccatagaaacagaggaaaatggtggctgccatgggctgcaggagagcaagggaaatgagggagttttgttcaatgggcataggctgaaacattccagagagctgttgtacaccaaggtgcaaacagtcattaatgtgctgctcacttaggagcacaaaagaagtgtgtgttatgtgtttctaatagaattgatattaaaccttttgatctgtctcaaattgttcgttttgtattggaaaaaaatgagatccaaggagtagagtgatggtacaattttcaggtgacaatggagaactctgagctggcatacttgaccctgggccttctggtatagcactaaacctgagttagatcaggaggcaccagaggaagaagggctctgactcatgtgggaagcatctttctttgcctttggcttggcagatcaacatcacccagccaatccattttgagatctcagagcaacacgtcaccagcctacggtttcctctaatttaggactttctgagatgcagaggtgtgtttgtaagccaagcactaccgattgtctgagctggcttcttctcccaatgagaattccagacagcgcatttgcaaagtcaatgccagaggtcaatctgtgcagacatgtttgagtggcagcacttacctgtgtgcctggctacttttctctcatagatattgcatgcactatcattttaagctaggtgggagagagaggacagggtaatggattgcatgggacatcaaagcagaagtgggaactatgtagaaaaaccatccaaatgggagcagagggcaacaggagggcactgtgggagggagtatatgagaaccaatctagtgacacacgctgggaaaacaccacaatgaaacccattatttgtatgctcgcatgagaatcaatttgtagtgaacatttagacatttgtttgcaatgtttatatagtattttaaaaatatttcatggtcaatcatacacagattagatgagtctaatttttcttaacacagacatgaagggacaaagagtgagctagggaatggagtcactggcatagcacagacagcaaaccccatggtctagggacaggcaatggacaaacagtcttcttgcatatggtttccttatgaaataagacctaggattcatactcgacagagtttcatttaactcctaaccacactgcttattgcttcgtgcctttggatgggttatttgatatctctcaaccccattttcctcttttaggaaccaaaattgcactttctggtgggactgttgggtgagttaacaaagcagagttctcatagatatatagagccctaaaatgtaagtagccgttccgttcccggagcagtaggagtaggacttgtccctttgtctttgtggatggttggattcaggatcccttcaagtccctcaatctggaaatgctgaggtcccacatagagaatactgtaacacttgcatttgaacctgtgcagttcacccgatagtttacattatctctgcagtacgttttctgcctagggtagtgtctacttatcgattcattcacttatacacttcaagggattgtctccaaaccattttgaactgagaccagttacatgtctaactgtggggtccatggatacaatgggctgactatgtatacacattcatatcggtcctcaaggaatgactggcacaaaatgattgtggtgcccaatttgtgacatgatactctttcttggaataacagtttgcttcacagagtttttctcccataatttcttgccacttctgtaaaatgtgtggctgactaaggcctctgctttactgtcataatcaaccctctgtgggagagtattagcattttatatgtgactcacatatcagtctgcctgaagctcaccccaaggcactgatctcatgccaatttcatctctaagtctggttccctcttgcacaatgagttcaaatgcctccatgtctttgttcgtgatattctcgaatcaattgtatgaaatttaaatttgtgtttaattttgcaaggaaatgacttctgcagtgtgctcagggcagaaaacaagaagttcctgcatgatcacaacaacagtcccttaaaactctcgaattaacccttttacctcaaggactctgtctccaaaacacttctctttccttctctccattgcttcaagtccatgttttcctgcctgcctgtctttctcctttcttctctataagacataaatttccctttttataagtaattatgtgaccaatgcagatatgtgggccttaccttattgaaattcaaacatgtcagagcatccaaatgtcaccttgatccctaattcagtctcagtccccaatatctagttgttagatattcttctatattctccactatattctctatagttattagactgaaccataaaaatagtagctcttaaaggactaaccagtcaaatgtgattaaaaaatctacctgcctatttatacacagctatttagagtactattttgtagattggaaaaaaattagaatcatgctatacatattttgctgtaattttaatgcatataactccaccttagtccttttaactatcaataaagtactttagcatttttaaaatttatttttctatctctatcatctatgtatcatctatctacttatgtatttgttgctattataaaacatatgacacaggcctctgttacataatgatattaaacatttacattgtaaagcaaatctgaaagcaatttaggaataagtttttgcttgcctatagaagcaggtgaagagagccatagccaagcactgggcagagctctgggagtccagttgaagagaagggagattgtgtgagcaaggggtcaagatcatgaaggggaaagaaaataacagagctctgaacccatgtcctgtttgtttgaagggaacaaaggagggttcatatggtctggcatagagaccatctgaggaaacagtggaaatgaaagtgagctgaaacattctgagatgctctggaatcttctggaaaataggcaagagacccgatttgtatccactagcaaaataccactccccctttccactctgtcaggttcctgtttctcttgtcctttgcttccaccatctctcccaagtcattgcttccacatcttctgcttccttaatctctcaagtttgattcagcacaaacttcccctagacccaggcccacatggttgctgactgccttgatctcattcacttaatgtttcccttaggagattgccctccccttcctgttccagtgattgttgtcctgattccttaggtaggaaagccatggtttagaaagtcctcagggagcagtggagaatgcctggtttgtccctcaccacgtgtagcagagaacaagctggcactgtcacatctgtgtttttcagagcgggagaaggaactgaggtgtgtaaggctacagagatgtcagtgtctgaccacgatgtgtgtgagatgataaatgtttgaggtgatgaacaatctgatagccctgattttactatggtgtatgtagatattgtccggcaaaaagatataaaatcattatgttccacttaaaattttctggtagtataaggattgagaaggtgtctcagtcgatagggtacttgctacacatgcaagatttggactccaagattccaatgctaagagtgacagcacacgtctgtaatatcaattgtggaggccacaaggcaaagccaggcacttccctgtagctcagtagccaatcagcctagctgaatccttgggtttgaggagaacctctgtcttggaccaggaaagagggattgagaaaaataacaatggcaacttctgtcctctatgcacataagtacacacatgtacttgcattcacatgcacaggtatatatactactacaccacacacacacacacacacacacacacacacacacacacacacacacacaccaataagtctttcagccaagccggccgagccctgatgccacgtggatgctttctgccaggctgcccaagttctgcccactgccacgttaaggtctcatgtaacacacagagacttatattaggtataaatgctgcttggccaatgaccaggatttcttatctgctagctcagtctcaattatcataaatctatatattttataagacttatcttattggatgcctgcggaagcgtcctgtcttcctgggctcacatggtgactctgccctttctcctacttttcccagaatcctccttgactctttgtcccacctatcttgttttcctattggccaacagtactttatttatcaaccaataagacaatcatatacacagaaggacccccccatcacacacacactaaaactaatgtcaatttttttgatgtgctttttaaccattattttggtactttgaagacatgaacactagtgtgcagccttgggaatgtatggtttttctatctactgatttcccaaggaagaaatggttatttctaagagcatgggacccactgttctgcaaaagagctttatgttcctaattagtggccagggagaggcgagaggacgggagactatgggcacttgagcctttagcacagtttatgagatgaagaatggaggtttgggatcattgctggtatttctcttggctctgcttctgcttcctctaaagtcctttccctatgactgtgacattatttcttatgcaatttgagaggacagtgccagacgacttattcttgcttaccctttaattgcatatttcccttttctgttttggtgcttgtcttctagtgtgtataatattaatggtatggtatactaatgtaaaaactaagggccgtgatggtgtccatatactcagggtgctggctgacatttgtttttcaactacatgtacacatattcaaatacacatttgtctattcctggacttactcattgatttcttgttggattcctgctgtgtgccagtatttcctaggccataggaatgtgctggtgaacaagtttgaaaactgttgctctatagtaatggttaatccgtccatcagacatactaattagtcttactaaaatactttttgatagctgtcctggaaacagaatgtaccagaaatttcacaaaagtactgaaagtattagtaaattctccacaaagcaaacacctaaatctaagtatccataattagaataaacagcagattgttctccttcagtgtagtgagaagaataaataagaagaactggaggtaatatgtaacgaagtcatggatcttggttgtctctagaaaacagtgccaaggggaacaaacctttaaggggcctggcttagcattgatttcacgcctgctctctgcttcccagcccactaagatgcaatacacaactgtcttgttttctttctatcgtctcttccatgacatgatggactaaaattctatgaaactgtgagctgaaataaacatgctctccttcaagttgctttacaagtgtttggttacagcaatgagaaaggtaacgtgctaagtgagaggaacagtgctaagctttgtattcaacatctcactccagctagctattattgctcccatcctctacagcagtgcctctcaaccttgctaacgctacgactctttaatgcagctccttgtgttgtggtgacccctaaccatacaatttttttcattgctacttcataactagtttttctgttgttatgaattgtaatgttaatggctgatatacaggatatgtaccccctttgaaatgttcattttatcgctctaaaaatgtcatggcctgcaggttgagaactgctgtcctagagcatgggcattcagttaaagaatttttccaaagcccaagagtctatttagaagtttacatttttaccaacattgattaaaatggggatttaaaagaaggaaatcaagaaatattaagattgcagatctcatctttcataaattcttctcattttgtgtatattgtccgtgagggaaacataagaatagaattgaacaaccatcaaggagcacagttaaattcatagtcaggcacagaaatccacaaagcctggagtgggcctgaagtatcaggattaaaaagatttcttgtgtaaggaaaaatagaaaagataccccgtgtcagacagtggttcgtgaaatgaagttagtaaagtaagtgatttaaaaagaccgcaggaagtgttaactttgaaaattacttggcaaagacactttaaaaataacagcactgacaatgagataacttcaaatagggcaaggaagtcttgtgcaattttctaatgaccctcatcccaggtctaatgtggcagggccctgaaagttacaggctgggaactcagtcctgaagctctggtatggagagagtgtggattcaggtttatggcgaatttgtgctcctgaatttcttgaaggttagaattaaaccttttagaagttagaattagaagccaaagattccaagtctgagcatcattttttttttttttgcataagtttattcgtatttcaagtgagtcttaggcacagcaagtcaggtgcgaagccatgtctataaaactcattgttctcccttcttgtcctgctgttctgaactcttgctgttgcattaagtcccctctgagaacagtcactggaatgggtaaagcttgtgtgccaggagagcagaacctgttttctgtaccagaccctgaaaatcaagctgtggaagaagatacagaaacaacgcactcttttaggagacaaaacagaacaggattactttgggaacttggagaaagatgcctttgtcagactaagaaaggcttctgaggagcagcttgtactggactttaaaggataaatataaactgggtatggtggtctaagctttaatgccagtacctaggaggtagaagcaggcagatctctgtgagttcaagcccagcctgggtacaaaatgagttacaggatggccaggaatactacacagagaaaccctgtttcaaactcccctgcccccaagggggaatatacataaattttaagccttttttcttcatattttatcttgctataacatcatctgaggctgggtaatttcaacaattttatggttctgaatccttggaagctcgagagtatggtgctagcagatgcttggcatctgcagaaacatggtgaaaagcatcacacagtgagagaacaaatttgcttgctttgaccactcttcatttcctgatcaagtcacttaacaacataacctcatgacttcatctaaagctaattagcttccaaagatctcaccttcatatatcattgacacatgaatttgcagattatatgtccaacacttggacttgtagggactatatccaaatcatagtaaaggcttgctataattttgaaacaataaaaaagaaaattaaacaggtttacaattcctacactaaaagacaatatttatatttatgtatgtttttagaaacttcaatgagcagcttttacaggattagaatgaaaatacctgcatagtttttttcttttaacctatcattgtttcctctttttctattgtgagaacactaaacattttttttattcttgaaatttcatatgtgtatacaatgaaatatcataattacctatatcttcctcctccagatcccattatgtttttctcaacatatcctccttccaacttcatgccttctcctctttccccataacccactcagttcagctagtgctgccaaagtgagcagaggcgtggagccatccgctggagcatagggaacctaccagtggccacacttcaaacgagagtgctctatgaaaacatctttttgatgttaaatatttttaaaaatcatgtgactttaccaactagcagtttcatttatgtatatgatatatatatatgtatatataaatcataatatatgtaatttccataattttcaaaagatgttcacttgggctattcatttaggttgttaacgactgggggaaattgtccgcaactccattattgatactgtgctcacccctaaaatgatcttcatcagaaattcttggaagtggaacatcaagacaaagatgtaaatatccatatgcttgcgaatattttggtatcatttgctaagttttttgttctataaaaattgtggggcaaatatgagctgctcacctgcatagcacttcagacatcctggctgagtcggacatatggaaggaataatgagcaactgactcagacaaaagcaaagagtacgtggaagatgtgaaatgtgatgaacttgggaaaatggcagagcgttgtggtggaaagttagctgttcacgctgcaactagaggtttcagggcagaggaagagaaggtttgcttgtgttcatggagctgtagttggaagtcaatgaggataagctgtatagctgggaagatggaggcacagaggccaatcaggaagacatgatggttcagtgagaggtgtgggctaaggggctgggcagtggcgtcattaatagtgggaacaaaatagatatggaaagtcttaggagacgaaaccgacaggattggacgtttcctgtctgagatctggctgggactttttgcttgataatacatttcccagactggatgatttgattagaggcaaattttgtagggtaggaagtcagaaaagtagagaagcgaggtctgttatttgtgacagtaggatgttagaagtgaaggagtgtacacagtggaataagacttgaatctgtgtagtgtcacttactaaatgaccagttgtttagcatgtcagagcctgagcattctcacctctgagatggaatcgatttcactcaatttacagagtgacggtgatgactggagctcgtgtgtgccgagtgctgctaaaacaacaaggagtccattccttgctcccccttccatccccgccagagagccaacccctgtgctttacttctgagaacaaaccgcaacaaatcttatctatgaaaattcggtttgaccacagcaacaactgacctgagcaagggggagctcttggtccccagactgatagctgggaaaccagcatgagactgaggcagaccccgtgaacgtgggtctcagtgaggagacctaggaaatctttgggaactcattccacatagagggatactcctttagcctagacaactggggctgggcctaggccctatcccaaaggatatgacagactctgaagaccctctatggaaggcctcaccctccttggggagcagaaagggtatggtataggtagggtgttagttgggggagggcaggggaggaggggagggagagggaactgggattgacatataaaacaatattgtttctaattcaaataaaaaatggagaaaaaaaattggtttgattgtagtcacaaatgcttagagtctgtgctaacctatgacccttgctagaagctctttgtcatatttataatgcctgtaacatcctcaaatacatgctcttcatgcctagttttcagagaattgagaaatgaaactcaaaggatttcagacagtattgctagaaaatgtcagagctgtggataaggcttttgcagaagtcacagtgacattccattaagtctccttatggaggctgcaaagacattttcttggagtcacagaaataaagcaaatgcatttcctgatgagctacatcagaccttatttttagaggaatcatgtcatgtaacaaacctctgtttcctatgttctgtctgtggaaagaatctttcaaaactatttgcaatgtcagaaggaagagagggtgacaggaagggacaaagtggaagcattacacatttccctttttctctgactcagattctctgaaacattatctgaaaacacaatgccaggggcaagatatcatccagacacttccttatcttttgactgtgtttaaaaacatgctgtggtagagaatgacattcatctcaagaggatagcgctgatttcctcaaaaaaacaatttgtagggttgaagtttcagagtgaaagtgaccatgtaaaacccttcaaacagaggcaggatatgaccccaagttggattaagagatgtggtgtcactcagccaacataaaatagatgtgcccacaaataatttaatatgtaagtaaattgaagaccctggttattactcccattttacttatgaggcttggagtgctgctatcatgctggatttaattcgtagccttaaaatcaaagcctcgctgggcgttgatgccacacacctttaatcccaacacttggaaggcagaggcaggcagatctctgtgagttcaaggccagcctggtcttcaaagagagttccagggcagtctctaaatctacagagaaaccctgtcttgaaaaaaaaaattcaaaggctccatggccctggtgaggacaatcctgaatctgagacccttccctttaaaacaggatcttatatccatttagagacttttgagcaacaacatatgccatgcactgttatagacacaccagacacagtggagaataatgacaacagatatatttgtccagtgcatattatatttgagttaaaatgtacattaggtagtggtcagtgctgagaagaaaaagtaaaacagaaaagatgttaacccttttatagaggagagtagttagaattttaggatgcccagggcacctctgtgagataggttttacttttgtttctgttttcttaacaaagtaaaggaagtgcagggagaagctttgcacattgctaaagatggcaagtaggcagttacagacagtcatgtggtccaaggcctcctcttaagagaacggcataggctgcagatacattatagagaccatcagctaatattttactaccgttaaatccattagccttatgaagttaccagagagtcattcattgtagacaaagtttacccaaacactgcactctgcagcatattgaaattaataaacacggaagagaaaaggaactatcagaagagagtgagaaaggacagaatgacgccccaaaaggagaatcaagtgtgtatggtatcctggaatcaagcggaaaacgcattttcaggaagaagaatgctgaagatgcatcaagtaagtgatgggaggaggggaagtgatcatctgggtttagcaacatctcagtctgtgtccttgtgaaagccatttcggtgaaccattgagacagaactctattgtgaccaggtgcaagaatgaggctagagagaaactaggcactagaagcaaagaaacggtgtccaggcaactctttcaagatgccctactgtgatgaagaagagaaagaaatgtgactacaatgaagacaaagtagactcaggggagactaattttattgtccaagtaagaaaaattatcctaaacattcagaggcaaggaaaagaaaaattgagtagagcaggtaaagacctgagttttctagataatttaataatatctacagagaattggcatcgtgatacaattgtacctcattatatcaatcaaatagctactaggctctttgcatttattaccctctaaagttacccacttgctgaatgtggtggtacatgtctataatcctaggatttcagtgaccgagacaggaaaattgctgcaagttcaagactaggctgagtaacatagtgagaccctgtttcagaaaatccaagtaacataaaataaaagcataatcccattttacaaatgaggaacctggggcttcaagtgttgctacaacattctacaaggtatgctcaatctgtgtcctgtgaggaacacatggcagatgacatcgatggacgaagcccaagacaattgactttaaaaattatgggagttttttgagatatttttggaactggtttatgtggttcccagctatgaacactgaacactgtaatggctttccttgatgtcaaaagttaagattcttaacttttagcacatataaggatcagcaaaggtacatattaaaacgcagaacttaattccctacttctgggccagaacttaagcatctgtgtttcaaatgtgctcccaggtggttctggagccacaggagatgttagagtctaaagtaaacgtcatgggtggtgctggcctctttgatgaaaaactctacttctttctaccatgcgtgggtcctcccatgcttttagttgggccatgaaccaaaccaaagtaaagggaaattccatagaacaacagaggaagaaaaataaccatttcttctgttgtcttgctagaagaatctagaaggagggtctggaaagatggctgagcagttaagagtacttgctgcctataggcaatctggatggaggcattttctcagttgaggtttctctgcctgaattactctaggttatcttaagttgacaatactactactactactactactactaataataataataataataattaataataataacaacaacaaccaatcctgtattgtgggaaaacaaaaacttggctaccgggaatattaaaaccagccgtgtttttaacttttcagtgtttcacttgtaaagtggagagaaagtgtggagatcaagtgaagtattccctagagataataagcgctgttcctagtgttaacatcgatgctctcattgtaggcgttgttggaatttgtggcgatgtacacgtgaaagcacagaatactacctaccagacacgggtcagcatccttgttttcttcccacggagtctaccctgagattactgagtaatagcttttaatggaaattcaagggaaaggggaggataaggagggagaacaggaagatgaagagaggatggggcagacggagcaggaacatgaaaagaaaaagaagaaaggaggagaaagaatttaaggatctaggtttgagccataaaaatgaatccatcctgaggcacaattttaggaataaaatgaattaaaaagtcacagagaaaaaaaaatctttcttgggcaacaggaaataccagaaagactagaagaagattcttttggaagtctgggagcatttacagaaagtcctctgtttgctgccagtgtcacacctgcactgaagggactcagcagaaagcaggcagttttgaggtccacattccatctttctgaaatatctgctagtggatttggtttatactagtttgaaatgtcattaacttaacctttaggtcttcaaatagcatatgatcagacatattttgcaatcttcttctccttctcctcctccttcttcattttgtgtttgtctttggaaattcagaaagcagtgaaagtaaaaactactttttcactaaggactcccaagcaaactgtcactctaaaatgatctttaagatagtaatttgttgaaagttcagcaactcttttgtgacactaactcaaagagctttgtcttgtcatattaaatcaaattcccagctcttaatgtgccttgcaatataactaaaagaaggagcaagggctctgagttctgaacatgttgatgtcctgagacatgaatgagaaaaataagatggtgaactccacatttcttaagccaaaggcaaatagagtcatagcacaaggagaaaagatcttcagagaaacccacagagcaggttcagtcttaagagtcaggtaggatgtagaagtgagctatcaaaatccactggatgagcacctcaagacttcagagttgtgaacactatcttcactagctagctccttgacactcaatggttttgaagatgaagaagccctagtagcagtggatagtgacttcatctatggatgaattccaatgagtcaggcacttccttctgggatgttgcactcttgatatggagaatgagtgaatctttgactgtggatgagatttgctcagcactcgggtccctgttgataacactgcagtaatgcgaaattactcatggccctaaagaagccagctaatctcttctcagactgttccttgtaactcaactcagtggctattcatcaagacatgtgacttcccaggagcttgtatctgtcttgctagtgtcctgtaacactatgctacgacctctgcccttagataaatatctgcccatactaaaagttgagtcattacatgcttgatgtctcatttttcctttcttctactccagtctatgcacaatcctgggaagacagtgaacacccagcttggcctggtctttcattttctggacaaatgcagttcacatattttgtgatttaatgacacatatgaatttatttctaaaatgatatttaatgctatttaaatgattttcatgaattctatgtatgtattgccattttgtttttactttccattgtgacttaaagtcatatgttttatttctattatattctattctagtggctaaatgtaacattttcaaagcctgtacttcattctaattgttagtatcaatgaccaatattttagttcatttttgtgagtatactcagttgtaaagaaagtttctttttgctgcagattaagacactatttaagactgtgtccatttctgatttttctattttgttccagccaccctgtagtttatgtgcaacagaattcaccaaattgaaaaaaactattatatttaaaagtatcatatttaaaaatgtatatacatataaaaatgttattgggcggtgatggttcatgcctttaatcctagcactcaggagacagaaataggtgaatttctgtgatttttgaggccagtctgatctacagagtgagttccagtacagccaggactgttaaacagagaaatcctgtttcaaaaaacaaacaaaaaattaaaatctctctctctctctctctctctctctgtctctctgtctctctctctctctctctctctctgtgtgtgtgtgtgtgtgtgtgtgtgcgtgtatgtgatggtcaaagagaatttgtgggagtcaattctctgctcccattatctgggtcctaaggatcaaacttagatcaggcttggcagcaattgcctttacccactgaattatcttagcaacccagaattcaccattttttagtatacttttacagatgtattcaatcatttaatcacaaggacagatataacagaaaatatctaccacgccaaatggttctttaccctcctttacagccaatgtccacctcattgtgtttctagcaactatgaactgatttcttgtcaccattgatgaaacctgtcattgtttgagtttcagaaacatgctttgtttgttacttctaagacttttcttttctctttggttttttgagacagggtttctctgtattgttttggagcctatcctgaaacttgctttgtagaccaggctggcctcgaactcacagagatccacctgtttctgcttcccgagtgctgggattaaaggcgtgtgccaccaacgtctgactgactttcatattttataatattgttgggatccatccatttgttttaccttctgtattttcaaatgtctcatcttaagttgaagagtatctgtgtttcttacataagattttgtttatgaattttgcatccatctttctaaaaaaggccaacctttactttctcagcttgttgtatggacaaacatccactcaaaccaaataaagtatcaataactgaccaaaggagcaattccataaagtccattaaagtgaattcatgagtctattggatttacttacaggtgcatgataagggtctacttataggcacatgggtgaccctataacagctatgtcacaaaaaagtaccacaccagcatgagtgataatgtttctatagctacacagatggagctccttttcagttagcattctcccttctccctcatggagcatcattcaaaaccatatgtatttagttcagagtcctctacagctgggagtaaggtgggccagggactgggtggttggaatgtcaggtaaaggttttttgttattgttttgttgttgttgattttgtttttttccctctgtgtagctgaatctgtcaggtgaagatttaaaagctctctgtagctcctccttctatgaagtaatgtcagaagacctgatcttacgcaagtttcttgttagtcactgctaccactgagacagaaaatggtcaagttatgcctggtagacactattcttcaacaatgctgtctttttcacagtaaaatttcctcaatgactcaaaaattcaaagaaacaatttttccttctgcaagaacttttgtaccccattcccaatttgaaatagattgaaactagttgacccgaatatttaggcattaaatacatttctgtaaattcagattccatcaatccagatttagcttaaccaaagtgtttgacttgtgttcaataaatgtaggataaattgttgtaattcctaagaccagtagttaaatgactgaaattagaacttttagtttatcctaaatttccagttgttcaaagatattgtaggagctggcaggaagtgggaatcttagataataagtggaaaggctaagggaatcaaatggtcattttgttttcatgttattggtagatagaaatagagttaggaatgtagagtaggtaaattgtgcataaaaggccaggttaattaaagccagcatttacataaaaagaatgatagaaaaatactgtgagtttgttttctagaatggtaatccattttttttcaagggccctgttaagtgaccttctagtgggataaactgtcaggataaccaaaattgtttatggtaatttgtttcatctatgggactatgtctaagaagttgtattaaaattagcttataaagttagaaatttgtaatagttaaaatgtaaattaggagagtcagtgattttactgatgagtgaatgataactgttgtccatcctgtgtgtgcaggagatgaatacaataggttgtttcacagttgtgaccttagttgctgtagttcccttactgaaggatatcttcattatgtccagattttgaccattgtaaacaaagctgctgtaaaggtcagaatgtggtttatatggagttttttatgagtttttccaactcatttgagtaaataccagggaatattttttctaccctagcttaagagtatgttagttttgtaagaatttttcaaactttgcaaaagaagcatacagttttgcattttccccagtttctgtctattagtgtttataatttcagccattctcattaatgagcatggtgtctcaatcatcactcatctggctctgcagtggctattgagatatgatgaagagtatcttttcatgtgcttttaatctgtctagcttcttgggtgatttttagagatgcttgttttcttcttgttgagttccaatgattctttgtttgttaaaaaatagttctcaattagacatgctttttgaaatatttctcttagtctgtgcttggtcttcacagtccattaagagccctttgcaaagtagtttctaatttaaagactctaactcagcagttctcaacctatgggtccagaccccttcgagggtcccataacagaatcctacatattagacacttactttacaattcataaaagtaaaattgcagttatgaagtagcaatgaaataattttatgtttggggtcaccacaacatgaggaactgtgttaaagggtggctgccttaggaaggctgagaaccactgctctagcttattggatatttttaatcacatctttagtcttgttcttcaaaagctatcactaccccaggctatccagattttctccattgttatctttgaaggattttgtcatcttatattttacatttaagtctatggtccatattaggtgacctcttggagaagggtatactgtttgtgcttagatttctgatttgtatgtaggtgtctaggtcttctggccccatttgtaccattttattttaagtgtagctgtgtagtttaaaggatatttgtttcttttttttcctgtcatccctggtattttacaaagggaaggggttcatatatatttcatcacagtgctggaaatggacatcccctgtgaagtgttttgttgaaatgagcaaggcgtgggttcagaaaagtatagggaaaggtgagcatgtgaggaaaaagtcagtgagttagtaaattcattgttagttttcttctagtctgattactaagctgtcattagtgaatgttctgttttgcacaaaaccacaaacatgccgcggtattacttaactttagccagaggcatggttttcttgaattatgttcagttccaacatctgtggtgaattaagatcctgcttgtggctggactatggtaggtgcaagggcagttttggggtcaggaagtggcaacagtttgctcaaaagaaagaagagaccatatcccccaaaaggtgacgtgttcttgacagggtattttctttcttatttttattttctttgcattggtgttttgcctgcaatgtatgtttgtgtgatagtgtcagatattggggttacagacagttgttagctgcatgtagttgctgggaattgaacctagaacctctggaagagcagtcagtgcttgtaacctctgagtcatctctctagccctcacagggtattatcatagttaaaagttaattttcaaaaggtaaggcttcttgtatttactgagtgtagtgtcatcaatacaattcaactttaaatcaagtttggaagcttattcttgatttttccatacgccatctttgtgatgtgttaaacccaacctctccatgttctagggattatgtttgtttgctcatcaaacaagatcatcttactaatttctttctctagggttttatttcacagtgttaagacatttaactaacatcacagtctcaatttggtaacaggacactcaaacctagtttatttttgtacatccaggcagtaacattttcatggaccattgactaggtaccagtcactgttgtcggaattgccttacaaaggcaaataggacatcgttcctattgctaagttgttcacagaaagaacaatagtcaggaaaaaaggcaacatgatacctaactagagtcctgttcctggtactctggagagaagggattattgggtaaaactccttggagcttctgtagccttcttagtgtttgcaggtgggggattgattctaaactaaggacagtactcatgtgccttcatttgcaggcatgtttgagtgctgaagctgaactgcagtcgccattgcttttttttctcataccacctatgtttggagagatttttcaagctcatcattttcttcatcaaaaccacatttgaattccaagctattatctaatcttttaatcttcaacaatttgaacaaactagaaatgtgtttcctggcaaggagaatgacttcttcaaaccgaaaaatggggtgcatgactgaacatctcctctcctttaaaagacattctattctggactgcaccctttgttttgataagggagtagagcttaagcaagatgattatgcttctatggaataaaatatgactggattaactgtgacaggtgaaatgagaataaaacttgtcgagatgggacttgagtcatttctaaaagaatttttaattctcaaagtttattgtaattcttcatgcgttagacattagtttaatctttgaaaatttgtgctttggagactatgattctatgtggcaatatatgatgacaaattccaggcaaggataaattctactttataagtagcagagactaaattgcaaccaacaaccaagataaaacaaaagaccacatatttctatcttgtcttgggtataaaactatgatctatggattcctattaaccaagaagagaaagtggcctgactgcaaacctcatatcattatcttgcatgctggcaaaccagatccactgccatttaggacaccaatcagccaaccaactcattagtctaagaccaggagtctacagaatgaagactaagctgtcttccatggcatgaggcattctaataaatgtttgcacaaatgatattgtgcaaagcatactatagatatgtcagtgtatctaacaatgtgccaagaaaggtgaaatggtttagtctcatatttgcacacacattttaatacatacatggtgatgtatgggcaggttatcaaacctcttatttcataagcgaggctgaatgtgttaaagtgaaagtaaagtagtgagtcaatttaatgaaaaaccattgagaaagtgatggtacaaatgagagctgcagtggaaacatcaaaattgtcttttaaagctcaggatatgatgcaagagtacctggcttcaaatcttagctttgctgatgactaaatatatgagacagcttctatagactcaaatattcagtttcctcaactatgaaatggatgaaaaatgctttgttcacagattcttgtgagaattaaacaagctagtgaagtcctttatactgtctcatcatatagcaaaagctcattacacataattgctagtattatgattttaatatgattacttctaaaatgtatacctactcagttaatactaaaggactcagctttttttctaggctctggcatgaaagagatgaatgaaacatgatacctcctttgaaatgctttaaatcttgggtcaaaaggaaagatgtcttatggatgaaaatgcatgtaaaatataaacaagttagaacttcatagaaatcttccctctctgacagctatatttcacatgccaggagatctgtgcagctcttagggtagaaaagacatcagtagtgattccaactttgaattctaggatctgtaagattgaccttctgagaaagacataccatggtggtactatggttatagcagtaaccaacagctcttttattgaatttgactcctgtctaagcaacaactgctcttaactgatgaaccatctctccagtccttggaaatagttaagttttaaaatgtttatttaagtttatatattaccaggtttagtaacgggtcacaaaattgctgaataatttacaattgcttcctagaattattacacatgtacatcagtgtaaggtgggtcaagcatgctataactaaggctagatggcaagtcagtattctacagaattgtggggaccttgtgaaaaaaaagacttgtagatttttttgaagatcatggactccttcaattttaataaatattaatatttgatagaagatgagtaaaatgattgagatatattttcgagttgattcttctttgtgcctggtactgttatcttgcaatatatttttgttaaataaatgagagacttagttctgactatccaaaatgagatggctatagtacataattagagaaatcatacttgtgcctagggtattgctggtacaaagaagggggttctctagattgtgactgtgtgctatatttatcttgctagtgaataagaaaggctccgtagagtgaggaagtaacaaacggagccttgaagaataaataggatttaggtttattcatatttatgaatatttattgagaacctggaggcatgggattagagataaacacatctagctgaaaaaggctcaatttttgtctttagagttcataactaaaggaggatatccattcattcattcatttattcattcattcaatcaaccaatccatcctcatttcttgctctttgtgatggttagtattaactatcagtttgacagaatttagaatggcctgggagatgagcctctaaatatgcctgtgtggggttatcttgattacacaaataaggcgggaagactcatccactatgggtgatgccattccctgggataccgaactgtaccataggaaaaagtgaactgagcggcagcaggtattcttcactctctgcttcttggttgtggataagatgtaccagctgcttttgaatgttgacttctccaccatgatggactcaaccctggaactatgaactggaagataaaccctttctcctttaaatctttttgttgtagtatgttattacagcaacagaacagtacctaaggcatttttctaccacaagttctgttccacaatattatccatttgataatatttataaagcaaagcactaaatacacaatagaagtatgtaaaatgtttttgaagaattagaaagctttcatagaacctttaagattttgcatttctcatatgtgtgtcacactcggtctacaatgtaactgtctccttgcctctgaaaaggggtagtcttttttaccttttcactcttcatttgatttggatcttctaaatccaaaccacacaataataatacacatgtcacatttgatcttccaagttctcttactggcatcttagccactgttttgtgctccctctgggcccctacagcatttttgtgattataaaattctcttgcaaatgttaaaagtattacccatatacatcagtataaggtagaccaagcattctataacaaaggctgaaaagcaagtaagtcagtagtcttcagaaatgtaggtactttgtgaaaaaggagacttgtagattttttgcaagttcacggacactttcaattttaataaatattaatatttgatagaagatgagtaaaagaggtggagatatattttatgaatagctaaagccaaagaaaggtatgtgatattgagtcaagaagtgccttagtctcttatggacctgtgtttgaattcttgttttgctgtttcttggctgttcattttttaggctttattccctttcctggaagtggaggataataaacccatttcatgtgaagatcataaggcctatcagatcatggaattatgcactatttctcatttttctattcttggtgtttgacacaattagcttgtaatatgttttttgttaaatgaataatggacttagttgtgactatgaagtcaaggagaaatgtctccatttcccaccacagtagaaggcacatagacgatttctccattcagaggaccaaaataacaacttgcatttgaaaatgatgaggaaagtaaatgatactgacactaaaaggagaagtgaaattaagtgtctggtatacactaacatgatataattccttctggtggctggccactcacttcagatctaatgggagatatccttctgtatgttgtgaatatatgtttctcttattggttgatgaataaaactgttttggccaatggacaggcaggaagtagccaggcaggatgtataggtgggctaccagactaggagaattttcagaagaggaatgcagagagtgaatcacaagggagatgccatatagcactgaaggagtaacgtgctggagcataatgtataagccacagcctcatggcaataaagagttgagtagatatgggttaatgattaagagagagctagtcaataagaaccatgagcagtaggagttccctggtaaagtttttctggtcacttatataaactattaaatcatctgcaaataatgaaagtttgacttcttcctttccaatttgtatccccttgatctccttttgctgtcttattgccttagctagaacttcaaggacaatattgaagaggtatggagagagtggacagccttgtcttgttcctgattttagaggaattgctttgagtttctctccatttagtttgatttttgctgttggcttgctgtatattgcttttattatgtttaggtatgttcctgtcatccctgatctctccaagacctttatcataaaggtgtgttggattttgtcaaaggctttttcctcatctagtgagatgatcggtttttctttctcagtctgtttatatggtggattacattgatggattttcatatgttgaaccatccttgcatccctgggatgaaacctacttggtcatagtggatgatttctctgatgtgttcttggattcttggatttgccagtatttattgagtatttttgcatcaatgttcatgagggatattggactgtagtactcattcttagttgtgtctttgtgtggcttgggtacccaccttcagcaaagttacaggatacaagattaattcaaaaaaatcagtagctctactgtatagagatgataaacatgctgagaaagaaatcggagaaacatcaccctttacaattgccacaaataacataaaataccttggggtaatgctaaccaaacaagcaaaagacctgtatcacaagaactttcaatctttcaagaaagaaataaaagacaacaccacaaaatggaaggatctcgcatgttcttggataggcaggatcgacatagcaaaaatggcaatcttgccaaaaagcaatctacagattcaatgcaatccccataaaaatcccagcacaattcttcatagaccttgaaagaacaattctatacttaatatggaaaaacaaaatacccaggatagccaaaacaaccctgtacaataaaggaacttctgcaggcatcaccatccctgacttcaaggtctattatagagctacagtcctgaaaatagcttaatattggcacaaaatagacaggtagaccaatggaatcgagttgaaaaccctgatattaatctacacacctatgaacacctgatttttggcaaagaagctaaagttatacaatggaaaaaaataaaatatcttcaacaaatggtgctggcataactggatgctggcatgtagaagactgcaaatagacccatgtctatcaccatgcacaaaacaagtccaaatggatgaaagacctcaacataaatccaggcactctgaacctcttagaagagaaggtaggtggtactctcaaacgacttggtacaggagaccacttcctgaacataacaccagtagtatagacattgacatggatgtcaatgaggaggcctctgcactccagggagtccctggtagtggattagtatttttccctggtgtaagaagggattttgagagcccatcccatgtgaagggatgcactcttgccctggacacatggggaagggcccaggcccagcccaggatgatgtgctggactttgtggagcccccattgagggccctaccctgcctggggagtggagggtgaatgggttgggggggtaggtcggggatgggggaggaggaatggaggtgaggggagggagagggagaagggatcgacgggtgaaacaagcttgttcctaatttgaactaataaaaaatattaatttaaattaaacaaaagaactcaagaagctagtctccaaaacaccaactaatccaattaaaaagtggggtacagaagtaaatagagaattctcaatagagggatctaaaatggctgaaagacacataagagagtgctcaacatccttagctatcagggaaatccatatcaaaataactctgagataccatcttacacctgtcagaatggctaaaataataaaaaaaatatcaatgatagttatgctggagaggatgtggagaaaggggaacacttctccactgctagtgggagtgctaacacttacatccactttggagattcctcaggaaaatgggaatcaatcaacatccagcaatcccactcttaggcatatacccaaaagatgcatattcatacaacaaggacttctgttcaaccatgttcatagcagcattatttgtaatagccagaacctggaaacaatgtagatgtccctcaactgaggaatggatagagaaaatgttgtacatttacacaatggagtactactcatcagaaaaaaatcaatggaatcttgaaattcaaaggcaaatagatggaactagaagagaccatcctgaatgaggtaacccagtccccaaaagacaaacatggtatgtactcactcatgtaaggattttagatctagagtaatgaagtagtagcctacaatccacaatgccaaagaagctaggaagaaggaggaccataagagagacatacatggtcccctggagaaggggaaagggacaaaagctcctaatctaattgggagcatgggaggaggggagagggagctagaagaaagagaaggagagaagaggaggggagaggaagacatgaggaacaagaagatctagtcaggggaagaatagaggagagcaagaagacagataccataatagaggagagcaagaagacagataccataatagaggagagcaagaagacagacaccataatagaggagagcaagaagacagacaccataatagaggagagcaagaagacagacaccataatagaggagagcaagaagacagacaccataatagagggagccattctgggtttaaagagaattctgacactaggaaaaggatcagagatctacaaggttgacgccaactaacaatctaagcaatagtcaagaggctaccttaaatgcccttctctgataatgaaattaatgactaccttcatccacagctaaacactgagctgaactctggaatccacttgcagagagggagaagtgatgagcaaaggtgtcaagaccaggctggtgaaacccacagaaacagctgaccaaggggttgttcatgggccccagactgatagctgggaaaccagcataggacaattccagatcccctgaatgaggaggtcagtttggaggtctggacaatctgtgggctactggtagtggatcagtattttcccccagtacacaaatgggctttgggagccctctccacatagagggatactatctcagcctagacacactggggagggtctaggccctgctccacatgatatgacagactttgaggatcccacatggaaggcctcatcctccctggggagcagaaaggggttgggagaagagggtcaggggaggaggggagggagagggaactgagattgatatgtaaaaaagcttgtttctaatttaaataataaaaagcctgagccattggccaaacagtttataactcatataagtctctgtgtatttttttgggactaaatggctgtgggaccagagaggacagaaacttccatctgcaagatctacactgcttcctaaatcctcagtgggttttagtttcccactcactgggattcttttctgcttcaagtttcagaactcccatgttacagggcaatttgaaattgctgtggttagaaactggaggttggtataggtgtttgttttcggacacagtactctcctccctgttcatgctttctgttgtcactttacccatcagaaacagagtaacgacaaaagcagcctttggaaagaacaaggcctgtttcatattcagtcttagtatcttcctgggcattagagctgatgactcagggctagggttcattaacttctccaaagtatctatgtctagtatccagcacccatgcacatgccatttttcatggaaaaaggatgatgtggatctgattaaattaatcagttaaggagagaagagtgaactagacaggtgggcccagcacaacccctaggtctttgaaagacaagatcctgatgtgctggcacatgcttatcaaaccagcactctgctttaacttacaaaagtacccctccctgtgtgtgtgtgtgtgtgtgtgtgtgtgtgtgtgtgtgtgtgtgtgtgtctgtgtgtctgtgtctgtgtctgtgtttgtatttgttggtgcagcactaataagttgcccagcactaataagttgcccatgctccagtaaatatcctcccacccacactgtgtgaacaactctaactaaactcagtgggtcacataccttcaattgtgtattacattaccctgagaggtaaaaggaaacttataatgccaccattttttttaaagtaaagaatatatgaaagtaggagggggtttgtggaatgaggggacttcatcaggaggggaagagggatgagaaaagagatggggcgaaaatgtttaaaattcattatatacatgtataaatctccaagaataaaaagaaaacaaaagaagcaacaataggaacacatgaatgattacaggccaattttattgtacattgattatattaattttctatttatgtaagctatttgtgaaaattgaaaacatcagtctgatctgagcacagttttcataaagaaaatcatccttataggttaataaaaattcagacaaagaagccaggtttcaataaaatcaaggatgactgtctaacatctggaccctgagactgccatgatttttgctgactgctgcactgaagaacaagtaaatagcctggaatctaagcttttccaaagctgagggcaaaaccatgcagttcttctgaagacaatgtttctaaaggttaagaaaatcccagcatttccatgctgcagcattattaatgatgtatttggggcaatgggagaaacacactaaatagcccttctgtcttctgagtcctgttctaacccacctcaaccactgccagtctcttgtctacagccctcccggaaggccatcctcatatgctgcagaagagtctcagaatctggaccttgcctgctctttcagctctttcaagtctctctactctaacctcacaggctagatgccctagctcatcagtttcttggagatgcctgcaaactctactgaatttcactcctcaatcccatatattcccatttcacaggaaatccttctctattgtttgcttcccaagtggcaactcttagtttttcaagaatctgtattgtttgtaacatggaaaaactgatatttaataactgcaaaacacagaaatacatacatacacacacatacctgcatgcagacacacacacacacaccagaacaggcgttaactacatagtataaaatgacaactcccccaaatagttctgagcaaaacaatcaatacaggaaagaattcatgctatatgactcacttcacaacaattttcaaagccaggcaaagtcagcatatgctatgtcttagtcagtcttctattgctgtgaagagactccatgaccacagtaggcaacactcataaaagaaagcatttaattggagcttacttacagtttaagagatttagtccattatcatcatggcaggaaacatgatggaactaagacaaacatggtgctggagaggtagctagggattctagatctctatctacagctagagagagacgctgggactggcatggggttttgaaacctcgaagtgtgcccccccaccaccttggtgacatgcttcctctaacaaggctatagctactccaacaaggccacaccttttaatcttttcaaataatgtcacttactaagcattaaatatatgagtctatggagttgattcttatttgaaccaccacaaccacaagcctggacaacagcagccatgaagcagggagaagctgggtgatatgggatattagtgctgttagttggtctgctcattacatgggtgctttcctcttggacatttacgacctttattatgactctttacccttgtacaaatatggtgttttgaagaaaagaagaaacaaaaaccaagattcgtttcaagcactattttcacaaaatacagggaaatatttgtttttcactctccgtattgtacatattttctttttatttgtatttgtcacacattgattggaatttatagaccttcatgtgttgttgtctattttctgtttgtccttctgagtcctgtctgcttcctcctctggtgtaatctgtgttctaggaagcttgcttggattatctacaggatggtggcaaacttcccaagaaggctagaaaaccaactgaagccagatttccctttatgcctgaccttggaggtcaagaagccttcttgatgtcacattctcagagtctgagtctctacgactggcccatattcaggagaatttgtctatttcttcagcatttagctcagtaccctgtctataataggcactagataagtcattatagcccattgaatagtaaatgtctaaatttaagctccctaaaagaccatttgtcacagaatcatcaatgatgcatcactaggattatagagtgcaggtcctataatagatgctgtgatctttaatgagtataaaaagccacactttgtaactgaacttgagctgcacatggctagagacagtcattagcattaccaggaagccatgcacctattgactatattcccttagatctgtgacagaaatgttcttctctatcgaattttcactttttaggggagcaaaaactacagtttaacatttatttgtgaatgtttaatatccatgataaaggtgtatgtgtcttggttgttaagatgaaatgagaaaattgatgtgataagtaagtaaaaattggaaatgtgttagttcatggaaacatgttagagctcactagcaagacttagaaatcagtattgtctgatgaagttatttgacagtttccatattagaactgtgtgcaaacagtaattttccttttgaaacaatagtttgtgttctaatctggccttaaacaaccctgtgcatggtctggtgagatggcacactaaaagtacttatggctaagcctgaaaaccaactcccaatactgtcctttgatgtacacacacacacacacacacacacacacacacacacacacacacacacacaactaaacaaacaaaaaatctcatgttttggaagatgatcttgaacttctgatcctccagcctctatcttcttatgctgggattgcgggtgtgtgccaccatgcccagtttgtgtagtgcctgggatcaaactcagggttctctgcttgctaggcaaacactttacaggccaaactgtatcatcagctccaacataaagactattttcaaagaattataccaatttttaatctttaaaatatgctttcaacttcaatatatttgcttgcttgtgtaagcctaacatggtcaagtacccacccagaaatctaatcagcacaatataattatagaatgttatctttaaagcaacttaatgcctcaaaggaaaagtatgacttcctttatcccctgtcatatcctaattaaactgagagtcttggaatttgaaataagaatgtgagagagtatgacaacatacaccggtaactccagtatctaggaagcagtaagactggcagtttaaggctagagtgaactatgtaaaatccttgtataataacaatatgctctcaccccttgtataataacaatatgctcagtatttttctgtgcatgttgtcacaaactcttataaacttagagtattatttcacaggtctgtggtgcatgaaacacagtttcactgtgctgaaagcaaagtactggcaagacacctgcctttctctcagaggttctagggaaagatgtacttctctggctaaatgggtggtaggtagtggaactctttgtgttttagactgaggcttaccttcatcattctgtttagtctcccaacatacagaaccccaaagcttctagaggtcagctactgtcctcgctttccagttctctttttccatctttatcttcagctacagctctggtaaactgaaatgcttctcctttgaatcttccttccttcatcttccctgatacaatgttccatttctaagacatgtggccacttgtaaaatgtgtggtggtgtgtccatcattggcatcaggagagaaatgagcaagtcaatatgtctgtcattgctgtcacagcaggtgcatatatttagtcttgttttgttttggttttgattttggttttgcaagacagggtttctctgtgtagccctggctgacctcgaactcacagagaactacctacctctgcctcctgggatttaaaggtatgcactgccactgcctggtgtatatttagttctgattttcctttccacaaatcacattctaaggtcatccaaacttggaagctcctggaatagcacctccctttgttccctttgatgtggctttttgctgttttcttggcagtactcttttctttgtagttcgcctttgtcttggcattaggcatttctttctgctcctaagtgctgctgttcccaccccaaagctcacctcaatttctttcagtaatttcatctgactcactttccttttcctctagcccagacatttggcttcctttaccttctgtgccccattgttctttagtctgatgccagtatttttaaagttggaaatagattcctttgggaatcattaaaaattattttcttacagaaataactttattttcaagcctggaaaaattcagatcatgtatttacgtgaatgtattcattaacagcgtgattattgtcccatgaaaagaaatcaattagggtgatgttgggagatgggccttcttctctaacttgaagaaaacagctctgttcctgatacatagaaaaaaaaaactttggcagattcagtcagatgtatttgctaggttggttaaaaaataattaaaaaatagtgaagtctttgaaatgggcccattgagttttagttcaggtccactgcttaaatgaatatacttttcattgccttttttttggaatgcctagattcaggtcatgagaattcccttccaaatgtccatcccttcaagactcagctcagatgttgcctggatacatccattctcatctggaccatctccttcttttaaaagttttctgttttgccctcttctgtgattgctaccaacacattcttggatccaacatggtgcccaggactgctgcagtcagtgaattaattcactataaatgcaaatccttgtagagcatgtatgtctgtttcaaatgttatgtttccaaatgcagtgctttgatctatgttaacgacgaaagatattttcagaagaataacatctactttaataactcaactctacctgaggcaaccatacatatgatgccatgtggagatgaaatgcagtgttgaattaaggagcgtgttcgtctaccagtgccctgtggttttgtgaagacagcggtgcatgctacataggaatcttttcctttggaaaaccctagtttattttctcaggtgtgaattttgatgtccactgtaagatactttaatcagacttttacattccagtttcgacatttagcactagtgtctccctgtgcagcagaagtcagttcctcacagctagctggatattttccaacatggcttacaggttgagtttataatgttcacatggatgtttttgtattgcactggcaaacactgtagtcagaagctattctctccttcttctctggagatttttacctagcaactctaaagtataatgacagccccagatagaagcatagcaaaggaattgagagcaatattctagaacttacaggctcaggttcaaatcctgccttgcaaattaccagccacacgatcatgggcaaattacagatctctagctgcttcagctctcacatatgtaagatggaaatgaatgtggacttttagtttatggtgttcttacattcacttagttaatttttggcagagcagagggttgagaatgaccacctattaagtaaggaccacaccacaaactctgaacaagacatgtgcattaatggctttatttgaattttcatttcgagaggaaaatgtttcatccctcaaggttttcacaaaagctatactctgcatattaaataactgacataccattaacattataaccttttaacaaattaagctacttctgtccactagagggttacatccttttgatattttattgtattttcagaataaaataaataaaatattattgttattttgagttctatttaagctttaatatgatcacattgatgctgaaattttcctctggtgttctgtaactgcaacccatgaaaaggcattcttcccagcatgcatgcacagggcacttggtcagatagattaacctttggcattttctagaaaaacattcatacttttgatatgaattcacacatagattttcattttttccttaaaaattcaaagtttcaaggatggagagtagcttagctgccaagagcccttatttgcagaggatctaggtccaattcccagcaccacagggtagctcacaactttggtaatttcaattccaaggaccatcttcagacctctgcaagcaccaggcacacacatgattcataaacaggaatgcaggcaaaacacccatatgcatataaatacatgaatgaataaataataataataaaggcctcaaagtttgtatcttaagatttgaaagacctgacattcctgggactggcagaagatgggttgcagtaggaatagattcttgattagagaaccatcagatacaaatgagagaaaaaaatagagcaggttgtggtcctgctacttatttcaaagattagatgaggaaatgcaaaagagaacaggagtggggtaccctaatactttaagtatctattccatggtaattttcattagtcagtgaaggtcattggctgtaagataattatcctacagaatcttctgtgcatgcatttgtgcttacatgtgtgtgtgttgtacaaacaataacaacaacaacaacaacaacaacaacaacaacaacacacacacacacacacacacacacacacacacacacacacacacgtggaaagtggttctcaacttgtgagtcacgacctcttttgtggtcaactatcagatatcctgcaagtcagatatttacattatgattcacaacagtagcaaaattacagttatgaagtagcaacaaaacaattttaaggttggggtcaccacaacatgaggaagtgtattaaagggtcacagcattaggaaagttaagagccactgctcttggggggactagagaccactctgaccataatcagtggtccacaatcagtgttaccatttgttatgatttgcagctaataagagcaaaaattattgagcaaagctttatggtatccattgtacaataccaagcaaacaatgctaaataaaataaaataaaacacagaccatatgtatgtagtcaggttgtgtaagggaagctgaacctaagtttaatccttatttttgaaatatattccttcactgttctttgagcagcgatgtgggagtgatgaactgagaatcactaatatcaagtttgatagaagatgacgtcataccatgaaggctctggaagacataaatgcaaaccattctgagatcttgctcccataaatgtacatcgaggaaaacaaaaactccctagaaaagatagagaaatgtttcaaaatacttcaggaaaaaatagaacacatagaaattaaattattgaaaatttccaaggtggaatacaagataaatatgcttagaattattaaagatgaaagttaaaagtattaatattttagaaatacacaagccatttgggaaaagttaaagttcctatacagaacattttataaatattaatataaaattacaattcaatgattactatcaaagtatgtgtgatatatgaaaagaaacttagaaaccaaaaaccctttcaacaagctgataaagaatatgatcaaattgtatgaaaaattttaaataaaaataaatttaccccatcatctaaaaatgactacattgttttgtataacaacttggctccatacaactttttgaacattttttatatttacaaaaatgtttgtagatggaagtttctgtcctgctgcgttctgcagccattcagtcccaaatgaacacacagaggcttatattaactataaactgtttggcctatagttcaggcttactatgttacaacttaaattaatccattattcttacctatgtttagccatgtgacttggtaccttttctcagttaagcattttcttcttgcttcctctgtgtctgactagagactcctctgccttccctcttcccagaattcttgtctggttgccccacctatacttcctgtctggctactagccaatcagcattttattaaaccgattgtgagtggcagattttacagtgaacaagagtattttccacatcatatgttaatgctatctagtttataatgtagtggtctatgaagtgttctgttatgctctcacatgtttttccaaatagtttccattttaacatacaaataaatgtattttttaatttattttttctagacttctaggattttaacatttgagattgtttcttttggcaatataacccaaatctggtccccaagaataagggcagctggcttttgaaaaaaaggggggtggatttgaagtatttggctagtgggatcagccctgcaagtacagctttagcaaagttacaaaattgctgttttctgtatttcctagaatatccctccttgtgtaatagctctcactcacttgttttatttcactgctttttctcacgtatcagggcaggtaccacctgcaaatgaattagataaaggccagatgtcccttgttctcaagtcggaatctcacctcttcctgtttgttttgttttgtttttgtgtgttttccacaatagcatgggaaacagaaagtaaagcttcttgagttgaccctctgagatcagatggagacaggggaagggctgcagatgtgcgcagtctttcctcagagaagagagaactttttcatcacacagaaccaatgattgtcactggttataatacacaaaactaggatcaagccaggagagcatcacgcatcacacagcttcttgacagctgagacaaggaacagatgaaaacctcggaaagaaactgatctcttttgaaaacaggaaaaacccacataaggaaagtctacaaaagaagacaacgtaagctaagcgaaagcattccaggctgctactgtgtaggctgagctctccttgggcctgccgccaagcatgtctgggtgcacagttcccggggtgtgtctcacttatctctccatactttcatcaagcttggctcctgacttatttcgtcatggattttaatatagtagattgataagtcattttaaacagttttacttaagggcattaaatgtcactttgtaaatgctgattgaactaggaattggtgacgcacatggtagagatgggacatttttgggtgcaactaatttcacagcgtagtttctggatgacattgagtcttcagatcaacctgtcagccacgacccaacttgaaacctgtctggataattcaaattttgctttcatctgatatgatactttcattatcataaatgggacttcatgaaactaaaaagcttctatacagtaaagatactgtgaggcagcctactgaatgtataaaaagaaaaaaatctttaccaactctacatatgacataggttaatatccagaatatatgaataataaaaaaccaaccatcaagagaacaccacagtcaaataggagaaagagaactaaacagagatattaaaagatgaaatacacactaaggaacatttcttaaaattcttgatatcctttatcaccagggtgatgcaaatttgaacagctttgaaatttcttcttactacagtcagaatgtcttagatgtttataaaaattaataataataggtactggtatggattttggaaaaatggaacactcactactggttggagtgcaaactggtacagccaatatggaaatcagggtagcgtttcctcaaaaagctagaaacaggtgtactacatgagccatctatactgttcttgggcatatacccaaagaactctgtattctactacagataaacctcctcatccatgtccattgctcccctatttacaataaccgggaaatggaaacagttgatagatgtccatcaaataataaatgaataaagaaaatgtgatatatttacaaaacgaaatactattcatctactaagaaaaatgaaattaagaaacttgcaagtatgtgtatagagttagaagtacttacccagattgaggtaactgagatccagaaggacaaatatcatatagtttctcttatttgtgaatgttgttagctttgaatcaaatgtgtatgttacatttggaatacccacagaggtcagtgaattagtaaggggtgttactaagcattcacgggaggggaccttgaataaataagggacctagtaagcattcaagggagggaaaaatagaatgcagtggtataaagggctaaaagggaatgatgtagcaggaagggttgaaggtgggatcattgcagtagagaagggagaaagaatagaaggattagaactggtggatgactacaaggaaacagtgtcttccagacaacaggactattgcatacctgcacacacagcaaatggtgatagtgtgcacaagacctgtgcaaactcaagccaaactaaatcccagcactgagaggagaggcaggcatggagtactccccaccccagtagagaagctgttggcaattgataactgctggagagaaaaagtccgttttaagagttccccatggttaagttgactacactccagaggaattctacttgtggtattttaaaaactcaaagattttttgggtttcctcaggattatttttgtttgccagattgtgtctcttcaacagcatctcccatgaggctctagcatcaaggccactgaaggtggccttctatgcaaaagtcatttttatcagtagaattcctgagggacccagagaattcagggcagtcaccagtcctgttccctaagggagaaacctctggaacaaagagtagaaaacacattacagggctttgcttcatgaaagggtcacttaaagaaatggtgaattccctttctgcaatctcacaaaatactgtgaaacaaacaatcaaaccaaaaagaacactatatagttggtaaaattggattggtagagagaaatggtgacagtatttattttctatttatttcaaaagtacagaagccccatgtcagcacatggtcagaagccatgaggaactgtaaggaatctttagacagcttcatgagtgcatggttaacacactctgtgaaacttagcttggagatgaattttcaaaagcatacacaaaggccaggggactctcctgtaataactgactgatctactggaaacatggtgataatgtttaaaagacagtgctgtgagtcgccccatctcagacaacagtccatcattgatactaagccaagagtgcatatgccttgttacagccaaagagttaggccagagcagttgtgtggtccatggtagtttaacagggtgctgttgagcatccaggtcggtagtccattatggcaatgagatgaactgaaaggagccattaagccttcattcacttactgtagagtgcaagcaaccaagcctttgttcacctgctgtaactatataaacaaatgtacgagtgtttcattttcttcatagaccacattggtgaaagtcaggaaaaagttgccttaccactgcagaatccctgccccaaatgcagaatccctgcttcattaagggcatagaggcagagtctaaatagggtgaggaaatgatctggaaatgagaaagtcctgggtcaaagaggagaacagtgcatctgccaagaccacaaataaggtagtctctgcaggaagtccctcggctaagcaccccataagaaagaacagagggcgaaatgtgggatgcctgaccttatgtaacatggagggcattgtctgaggcctgaactacagcttattcagaaagtacaacactcactgtacataaagttcagtggtcataaggtctgttggccaaagtcttttaatcgtctatggttatacttgaaagatcacacacagaatgcttgcctggagccagacttgtcaaatattacacaatgatgatcaaaacttgaagaaattagtctcaaacggtagtacagatggggcacaaataggtcaagatttgaattgatactccttgatgtagaataagatgtatgtgacttcatgtgtgaataggaacactgtccaaggacctcctgataataaagataagaaattcatattcatttacagcttcaagtacaaaccatttcttaagacctactcttggatggacctaatcttgctttgaaccatggtcttttgttttacctgacattataccacttactgaagatgaaataaaacactgataaagaaaagttgtcaatcaatcatttgaaaccctggtcaaaattaaatatttacaaaaatcatagtctttttttgttatagttcttggttcttggtttaaagacaaaaagagctgcttcctctctagaaggtcacagcatccagtttgattagtgtggaaatgagagaaatatccctttaaagcaagatgacagtgctctgtgcggtaggtgtgttcattgttctggttgttagagagaatatgaattctgtggcatgttatacacacatagggaactatttcaaatcatgcaaacagcgttcctcaaataccacaggtgggctgaaaagctgctgccgctctgagagagaaaaaagtgagaagacatgggaggggccaccactcctatcctctgtagatgggcgagtctatcacagagccttggtgtgaaagaacaggaaacaaagacctgtctttaggtctctttgaaatgactgtgctacaacttatgtcatagcttgccacagcctacctccccagggtttaaattaatacttgttccagggaggggtacacgggtgctacatgtcctcagaatcctctagttgatggctcacagtctcttcctccaggcttgttccatatctgaaagaccatcaggcttgtttgagctaaaaccagaatcatgaaagagggaaaaatttagaggactttccagttaatgacaatgttctgtcaacccggttctttctccttaggtaattcacaacgtttctacagcatgggaggaatatcaggagcatcaatgtagagaaaacaaagcaataggagttgttagggtcattttctacatgtgctttccagaggaagccaatgattaacacacagatcatgtatcatgaacagcaccgtatggtgtttaagagtctgagttcctccttaggcacatctaagtgatttgattcagttggaaaatgatttcattccattcttcataatgagggtgaaaggtcacatattccggagtaagtctcaatccgcttagggcagagaaagtcggtacttagaagctgtagttctgcttttcttggccccatttcctggaattgaattataggatgttctttaaactgagaactaactgtgctgatgggtaaacccacgagtagagttggattctgagaaacatacccccagcctctgatggtaccccttctgtctcctaacatactttaagcactgctggccttttctttgctaacattagaccacagtgataccaagaaacagtgcatccaaagatacagagaccctttgtaacagccaattcctgtcttttcaaggtttcactttgcctccatctctgtgatattctttctgcagggaatatcttctcattctgaatctcaggaacagaacctccttctttaggagttggtccaagtgtcatctcctgagggagtcactgctacaatacccattgcctaacatttacacgtattcctttgctctgggataaatgggccttttttttctgagtgtctctcagggcgtaattcttagacttctcacatcagaaggtattgtttaaaaatttttcctaaaaaaaaaaagaattttccttccctatggtaacgataagtgctgatccactataagaggccccatagatttccaaggtctcctcactaacacccacattcagggggtatggatcagtcccatcctggtttcccagctatcagtctggggaccaagagttttcccttgttcaggtcagctgtttctgtgggcttcaccagcctggtgttgacccctttgctcaccagtccttcttctctgcatctggatttcacttcagttcaaggtttagctgtgggtgtctgtttctacttccaccagctgctggatgaaggctatatgatggcatatgaattagtcatcaatctcattatcaggagagagcatttaaggtagcctctccactgttgcttagattgttagttggtgtcatctctgtagctctccagacatttccctagtgcctgatttctttttaaacttataatgtctccctctattatagtatctcttatctttctctcttctgttcttcctcaactcaacctccctgtcccatcatgtcttccacactcctcctcttctccccttctcattctcctagttccctctctatagtgggaaattaccaatatggagtcaggtagaaatacaagggtatttaatagagaaaagccttacttacagagcaacctagccagccggcacggcggtctgtacacaagcccaaaagtgaaactgaaagagaaatacagtcccttgcaagtatcgctttacatcaccctgaccacgccctcgaaagcgtggtcaggcacacctgtagccagcccctaagtaggcatggctacagcttcccctacaattccccttttagtctaaaagaagattaaaacttaacagtgtaagtatccaaaattaacaatcataaaggtaaaatataagatacaacaatctgcttatgtcacatcctaactatctattttaactaaaccctaaagtcatctgaaagaggtgtccaagcctgaacatctccttccaatcccaaccataataaataagaagctatccctaactaggtatatacactctcctaagtgacaacaacggggaaagggggagtagcatcctccaagttacttcctacagaaatgggccgacgatagtcatgtgggggtcctgtaggaagaaaatgttagtatagtaaaagtcttgaatggattgtatccagtccatgttagatgggattagcttgattgaagaccttgcttgaattcctcaacttgattgaagtcagtatccaaagctttggccagagtgtcgattgaaatggagcaagttggatccagtgcagttgcggaggtgtggcccattttcttttccaggttgtccagggattgctgtcagacaggtcttcattgactgtgtgggactcaaacataaacagttagcagagaaatgtttccttgtgtatgtacacatgctggggaatgcaaccatgagagcataacaattatgagagggtatacaccttgagagaaagatccaagaaacgacaatgacagtcccaaattcttcttttattctgtattacatcaattgccttcttgatacaatacagaaactctaaagtttagttaaataacgtgcttggattttagaggaggaaaaccaaatccacctctaaatccagcattggtttaattgaatagggactaggaaatgaagagaaatagagttctctgagcgacagctgtattggtttaattgaatagggactaggaaatgaagagaaatagagttctctgagtgacagctgtaaagtttaccctatgacacattccttttctcttcttaagtatctacccatgcagtgtcatttgccttctggagatagttttcctgtgaagataaaagcaaaacacttccctttactttgaggggtttctatttagtttatgagatataccttagtaggatacctgtcatttctccccgccgagaggtttttccttttccactcaaatcttgatcaactttgatggtatccaaagtttttcttctcctgtagaatccaatgcaaaacccccaccccaacgtaacacatgtcctggtttccatacagaggttagtacatctttgaagtatgcaggctgattgagttcagcagttttttccgtagtccagtgtctttctgcagctgtttgtcctttctcattggcattaagaaagtttagtgttaataaagcattatgcaacctatgtttggggggtttagtcttccaagcttgtttgttgagcatctccttaagtgttctattagatcgctcaaccactgcttgatctgtaggattgtgtggtataccagtaacatctttatgttataatatttgaaaaattgttccaattttgtagagacatatgctggagcattgtcagtttttatttgtgcaggtataaccataactgccatcacctctagcaggtgtgtaataacagaatcagctttttcagagttaagagcagtagcccattggaaccctgagaatgtgtctatagtatgatgcacatatttcaaatttccaaactctgcaaagtgaaagacatccatctgccaaacctcatttctccgaatgcccttaggattacaacctgctggcaatggagtttgattataaaaggaacaagtaggacagtttctcactatctccttggcttgttgccaagtgatggagaagtcctttttcaaacctttgctatttacatgatgtttcttatgaaattctgaggcttctatcacacttccaattaataaatgatcaatctcatcattgccttgtgctagtgggcctggcagacccatatgggatctgatatgtgtaatgtatataggattacttctgtttctggtagtttcctgtaattgtaaaaacaatgaggttaattctgtattatcaggaacaaattctgcagtctcaatgtgtaacacaactctctctgcatattggggatcagtaactatattaagaggctctgtgaaatccataagtaccatgagaattgcatgtaattctgccttatgtacagttgtatatggactttgacctactttacttacctcacctgctttataacctgccttacctgatttgttggcatcagtgtagaaggtaagaactccagaaatgtgagtttgtcttacaatatgtggaagaatccagactgtcttttttatgaatttaattctgtcagttttgggataattgttgctaattgttcccaaaaagtcagtaagagctatttgccaatattcattatctttccacaaggaggaaatttcttcattagtaaaaggtactataatttctgctggatcttttccagtcagttgacgaagtcttaattttccctttaaaatcaaatcagaaatcttttgtatatatgtctttaactttttattctgtttatgtggcagaaatatccattccaatatagtatcttccctttgcatcagaattccagaagggtattctctggatggcaagataaccagaatacagtctaaatcaaggttcatccaatctacgtgtgcatccaatattctgttttctacccattgtagctctttttctgcctcagcagataatattcttggactgtttaggtctttatcacctttaagagccatttttaaatgctttaagtcatgtccttctacatcaataatcgtctgtaattgagaaatttcccctaataatttctgaagagaattaagagtttgataccaatctctcctaatgtgtaccttttgaggtctgattctctgtaagtctatcttgtaacctaaatagttaatagaatctcctctttgtatcttttctggggcaatctgtaatccccaacgaggcataacttccttcaccatttcaaacatacgttccaaagtttccttattacaatctgataaaaaatatcatccatgtaatgataaacaagagattgtgaaaatttcttaccaattatttccaaaggttgctgtacaaagtgctgacacaaagtaggactatttagcattccttgtggcaaaactctccactgatatctcccaactggctgtgaattattaagagttggtacagtaaatgcaaatttttctctatcattttcctgtaatggtattgtgaaaaaacagtcttagatcaatgactatgataggccatcctttaggtattaaggaaggtaatggcattccaggttgcagagagcccattggttgaattaccttatatatggctctcaggtctgtcagaattctccacttacctgacttctttttgataacaaatgcaggaaaattccaaggactggtagattcctctatatgtccagcatctagctgttcctgtactaacttttctaaagcctctagcttctcagaggtcagaggtcattgtcctacccaaactggttcatctgtaagccacttcaatggcagggcctttggctcctctgaaggtccatcatttgtacctagtttctgtacagcatggatggttggtaaccgttttccatagcgtcttaccagatcttttctacaatctaaagattgtacataatttgtatctgacattggaggaatattaatctgagtattccattgctgtaagagatcatgactccagagatttatagctatatttgccacgtatggtttcagtatccctttctgtccttccggtccaatgcagaccactgagttaacactctgtagaactctagatagagttccaattcctaaaaattgtacatttgcctctctaagagggccatttctgaggccaagatttttgggtaataatagttacatctgtcccagtgtctactaagccagaaataactttattactaattttcactttcaactgaggccttttatcattaatagaagcttgccaaaatatgcatttctcattttgtccattcacacttgattcttcatcactattcaaactaccatctagagcagtattatttttcacaataggcaaagaactatctattggtcctgtgagagattgtctcccagtgctactgggaatgacccgacctttctcgatgtgggggccttcttgaggcccccccttagggttccccgaccttaatgggtttcctgtatgttcctggtcgatctacattcattggtccacctctcccctcccccattgctcccaatttgctcaggagatcttgtccctttccccttctccaggggaccatgtatgtctctctcagggtcttccttatttattagcttctttgacagtgtggattgtaggctggcaatcctttaccctatgtctaaaattgacatatgagtgagtacatacaatgcctgtctttttgtgactgggttacctcgctcagaatggtttcttctagttccatccatttgcctgcgaatttcatgattccattgcctttttttcctactttttttcctacaatggagtagtactccattgtgtaaatgtaccacattttctctatccattcttcaggtgaggggcatctaagttgttcccaggttctgtctattataaacaatgctgctatgaacatagttgaacagatgtccttgttgtaggaatgtgcttttaggagcccatcccacatggagggatactctatccccaaaaatatgacagacttcgaagacccccccatggaaggcctcaccatccctggggagccaaaagggtatggaataggtagcacgttagttgggggggcaggggaggaggggagggagaggaacttcagattgacatctaaaataattttctttctaataaaaaataaaatctaaaaaaaaaagagaattttcctgaaacctaactaaaactttctcagaattgaaaggaggatgagttctagtgctgtttttagtaaactccttaagtgatctataggcaactgaaaatttaaggaattccaggtgtggtgctcatgcctgcaatccatcatggtagggtggctaaaggaggaggatcactatgagattatgtctattctttgatacagacagacagacagacagacagacagacagacaggccagatgggcacacacacaagtgtgtgcatgcacacacttacacaggtagagatagatggattgatggatagatagataggtagatagatagatagatagagcaagctgccataaagtgaaggcaatgggtataaagaacagacatgttgtcactcatagatgttgttcctcctttctagcacatgaccagatattcagtaggtgattaataaatgtcagtctgaatcaatccttcattaatttttctcatttagtcatttattctataagaatttattaagcacttattgtgccacagcttgaatttggaatatcccccaaagaaactcatgtagaaaaggcttgttccccctgcttgatgctacagggaagtggtgcaaattttaagaggagtggtcaatgagtagtctctgggtcttgagatttcctcaaaggagatggttggtgccagtctctttaattcacatttgcctcttgactgtgtggtgagtgagtttgtttctttctttgtttcacatctgcctggagttcttgcaaaagaccaatcagccattgccttaaagtttaagaaccgagagctaaaagaaccctattctccttggaggttgattattgcaagtaattggtatattaacagaagctaagtcaccacatattttcctggaaactagaaaatggtgagcaaatataatatactcatcttattgatgtgattttttgaaaactctcacagttgctattgtcagttacatgagagtagcgagctctttgctacagcaaacttaagccatctttgtcattcctatatgtttgtttttggtttatagaaaatcagctccttcaagttgtgtcacaacttccaagcccagctcactttatttcacctctgaagtctttttttcttaacccatgagtcatacataccctttccctttcctattcactgagaacttttgctcatagttgtttcagtgactgctttactcattactttggggggttgttttaattttgtagaggggatgtcccatattattttgtatttgtgccatgcatacatttatgtctctaccactggaatgtgaaacctacaaaaatgctatatctgaactcctcttgtactttctattttattaaaactatatctttagagagaaaaagagaaaaataatggattattttagcatggaacttgtaaagtttatctctttactgaaagagtctccattggactcacaaactcttctttctcttataataaagtgctttccctgattacagaggaaaacacagatgaatcagtactgttaaaaacaacagactttaagaaggttgtgtctagaaatgttttagacaaatatttatcacatcaatcaacaaacacaagctgaatgatatcaatgcaaacacatgtgtgcagatgtaagcaagtctgttcttaatggctcttgagtaaagagtagctctacccaacagttctcaagctctgcttgtgatggaatcatctgggaaagtcccatgcccactcacaccctacaaccattaagccacaaggtgtgcaatcgccaaggaggaacttgtatgttttttttttttaaagatcctcaggttattaggatgttcaacaaagtttagaactgttttagtacactgttaaactatgattaaaggataattactaacaataagtccatatttttatgtggatagatggtactttggtttccaaaagaaaaagatcaggcatcctaatgaaccagttttatattagcatacatttgaattgagctaatgtaatatgtgttagtaaaagtccagagcaatgaatggtttatactaatttgattcaatgggtcaaaaataagaggacatgaagttagtgggagctgtggggagactctgagaggggctggaaaggagaagtgggaatagctatgattaaaatatgctctatgcatacatgaaattctctgtgaaaaaaatttaaaaatacattatttaaaaactgactgatggaaaacctcatagggatataagtttggctgtggcataatattggacattctttttggagttgccagcagctaatattccagaattcatcttaccatgctatgctccatccatagacagaagactcacacatgggtgggcattaaagtcaacctgaaagtaattaaaagatgaaatcaactgagagaggaaaacttgggagtttattgtagttttcagtatttagcagcagaatataagatgacacattatgtttgacactgttatatagtcacatgaccaaaacaatgtgaggggaagatctgatcctctagaatcacacatgatgttttatatacaccatcataattagcctatcatgaattctatggtgtccactgttgtctccattttccagatgaacaatctcaaattcaatgaatctggaagctattagttgaagaaccaggctatgaatttaggtccaataggttctgagattcatatttttcctttgcaaagccataaaatcttgtctctccccctttttctctgttctcccatgtctcttcctgtgggaaaatgtgtggtgtgctctgtagccataggctgtgtctttaagagagcacagggttattaagtctggctttaccaaacaggaactgagtgtccacatagcgtcatggtggtggagccagcatactgaagatatttgatcctatgctcaaggaaactccaaacacttcataaaaaatgtcccctggtttctagactggagcacatcagaatctctgacatcaccatccctcaagacctaaagtagtttagctttagaacgttcttccagagaccacaaacacttagggagaagaatccagtccactgtacatgctgctgctttggggacagcgctgtctcttgaccatttttagaaattccttaagatctagctagccaagtgtggatggcaagaacctacagctgttggaaagtgcttccatgactcactgtcatgtctcagcagtttcctagctgctccacccacatttgtcatatgcatcattagctgttctcaccaagaggtctgaagcgttatagacttgattctgctttctttgaattgcatcacgacactggctagggaaattacattatctattttaatgagattttccactgccacacttactgttagaaagcagctggagcccgagtagagactttttattggtcgtggatatatttacaatggaattgccaggacagctccctaacttccaaattgcctcggtatctctgccacagctgcctttatttatgctcggctcggcgttttaaactcacaccttttcttcatatcaactgagtattctatggcagacgctagcattccaggattatagactcttctccctttaaatggtggtttctggtcctaaaacagcatcagttctcttagcccatttgtcattttttttttcctgatgtgttccctatttatgcaggtcttagccacactgtatttacttcttctccaggttagactttccagcattctggctctctttccttccctacgcattcaagctgtaagtactgaaccctgtagtcatctaaccactgccttctctgtctctatgaccacatgagctgctgtaacacgaaatcacatatggtattattacggtgactgctcccatccaggttaagttgggtattcatttcacagttctctctcactctctctttccccctccctcctcccctctctccctctctcttcttcttcctctacctcttgttcttcctccccttccacacatttggcctattgactaacaatgactatggagtctatcacactaacttggctttcctttatatactttgcttaaaggttttcactattatgttcatcattatctctttctctgtacattaagaacaagtttcagccgtcatcttttcttaaaaaaattttcatctgtcctccaggcttgtttttttttttttggccaaactcttactatactttactttgttacaacttcaatttgcttctataatcaacttgtttctccaatatatcccattgtaaaatctaaaaaacaaaattcttctgatttaataaatatatagtatttattagtttcatatctcacatggtcccagaaatattttattgttcacttaaactctaattacaatattaattattatttctaattttatatttaagacatttgagaaagagaggaatcagataacctttctaaagtcaccaggaatattagtggcacacctgggagctgggccatggaagaatagcccagcagataccagatgctccttcacaattttatctgcttacttttttcaataagattttcaaaaagtagatagaatgttcacattcatttcttatgatgaaaactgtcttctgtgatctctgaaatcattgttgaaagctaccagtgactggccaatccaagaatatgcatggctctatacagaattatatcagccacaattcttatttcatgactgtgatggtttaaactgatattcaatttgacatgatctagaattagctacgtgtagcacaaaaataagtaacctggagactgatattggggttcaagcttcaagctaaagatcagaaaagcaaagcagccagcccttgttctcatgtctagctcaggctgaaagggctaatcacgagctttttgccaagcttcagactgttgcctttcctcagcatggctggagagaatccagcgactatctcagaatgcagcctgagacactgggctcctgccttttaaatacttctctagggctgagaccaaaggcatgagctctgttactcttcactcttgtgtaggccatggtggccttgaactaacagatttgtctacctctgaatcctgagtcctaggattaaaggtgtgtaacgataactctttacggagccgcccaagccccaccgccacgtgggcatccaaataacacacagagacttatattaggtacaatgctgctggccagtgatttcttatctgctagctcagtcttaaatatcaaccacaactattaatctatatattttataaagacttatcaaggatgccaggcttatgtgacctgtcttcccggggctcacatggtgactccacagggaagagaggaggaggaagagagtgatttcctccttgtccctgtttatattctgaatcttccttctatgtcacttcctgcctggatcacaagactttattacatttcccagaatccttccctgaattagaatagtatatcaaccacttgtctaatttttacctagtttttcttgtaagatggagaggaggagaagactcactttgtgttgatgaatgaattgagaagattaaagtgtggaatgcaatttcaggaccaaggcagagtggactagtgcccactattattattcctattgtttcttaggtaaacccttatttttcccttagcatcgatattaaaactgtagggtataatgtaagaattcattatgtacatgttcaaaaatctttgcctacatattagtctcagtggattgcttgtatgtcccaataatggccctgaatgggagataggaaatgtgtcattatgcacccgaggtattcaagcatgaatgtcaggccagtggaaaaataaaacagtgaatctggtctttctttaattttcaggtcgtgttaatccaaattttatctatgggcaaatagaacatccatcttgctttcagttatacctagataagacagttggatttcaaattactaaaaggtacatcctgggttttcataacaagccacaagatcactaagttgggtaatgccaacatcttagtaagtgccagactgggaggcttacaagggtctttctcactattaatttgatgttttaaatatacaggaaacatttacacatttatgaccagaaacacactttcatagggaaaaaaatctctgcaaatcttttctctctctttttgccttgtttatttaaattatttaattaatactcatatttacatatctattccctcattccctcaccctcccatcctcccatgttctccacaatccccccaaaccatcccccaactcctccccagggacagtgaggccctccaccagggaccttcaaagtctgtcatatcgtttggggaaaggtctatgccctccttgctgtatctgggctgcaacagtatctttccatagaaaatgggctcccaaagtccatttgtgctctagggttgaagactggctccactgttagaggtcccatagactgcccagaccttctagctggctcccacattcagaggatgtggtttggtctaatgctgtttccccagctttatgactagggtctccatgctttcactagattaggtccactgtttctacaggtctctctagccccgtcttggctcatttgctcatccctcctccctttatacaactgaattccagtagtatggttttgtgcttagttgtgggtgcctgtttctgctttgaacagctactggattttctttcttcccagacagatatgttgggagtacaattcagctggaatgcaatattttagaagcctgaattggtgattatttgtcaaatggaatgaaaaaagaaagccaacagtatttcagtgagatgaaatagaaatgaacattgaaagaaacacacttctaagacttggtcatgaggaaacaataaagcctgaatgcatgaatttatgatgaagaatatttctattggcattctttccaacatcataaattgaaaacagcccaaatatccaagaatagtatatgggaataaataacttatgctgtagatatagaactaaataggaattgcaaccaaattccagaaacataaaaccactcccagtaaagcaattattgtccttataaagcattacaatgtaatcttaagaaataaagaagacatgcctggctgtgctggttcatacatggattcctagcatgtagagggggatgggacgtttgaggcaaaccggggcttcttagctaattcctgccaagagaaaggaagaacaaaatcataaataaatatgaaaagctttagcatttagaacaatggcaatctctaggaggtatgaatgcacatgagttgatactttcaatattctcacttctctgtatttaaagagctttactttgttttttgtattaatcactctataattttataatagtaacaatttcaaatttgaaagattcaacacagtaaagaaaagaaaatacccagttggtcagtaagcttctgcaaacaaaaccaatagaagggagaggggacatatcgtaagtgagggagcacaacaacacagacaacacaaacttagtggcaaatgtagaagtgacagatataggatagagcgactttgagtggaagatagtcagaaatctgctctgccccaccccaccccaacttgcccaatttgtagactcttctcttagccagtggtttttaagggaaggagggaaaagttcataacattacccctccttttcagttttaaaatcacaatccaaagatattgcatctgtggtttcacccctactctaaaagcagctggtgacagatgaatggtatcttgagcaaggacaggattgggacaaccttaggctcctaacagaaaccagagaaggagagttagaacatgttcattagtcctttatagtatctttgcatgtaaatagttattaaccaaggtgtcaagtattgtaacagagatgcaggagatttgtctagaccattcctcaagaagccaggaaaagttaaccaagaatcacactcagtctgccagtgttcttccaatggtatgtatatattaaactttcagatagacaggcatggacaagcataagaaagtgaggcacaagttcaccaaatacagctttatcttcactctctgcaaatgcactgttggtgtctctgctagagaatgaggagactgggctagctaaaactttcttatcaccacagcctgtctgaaaggacagtgcatcagaagacatttgtttaaacaaatctttgtaggggagaattcttattgggaaacttgggatttgagttaagcttaaagttgggttttactagtgggatcatttttcttgagaatcttgacattttttaagggtaaaactttccatttattaaaaactaattagattaatatggtcaaataatgtttacataattccatacttagaggaaaaatggaaaaattcactaaatcatctcagtgttttcttggcatggagacaacaatccagatttgtttaagaatctggatgattgggatttgctaactcaaaagtagtcaaatttagatgacactgtggtttcaacactactttgggggacatcaggaggttaaggatcagggacaaaattttggggccagacttctgtggacaatggaggaagacagagaggtgaagacaggccaggtgagattggaagttcagttgggccacagtcttgattgagctccccttctgatgttgaactgttgactttcaaacaactgctctcccacctgcccttttgttccctttggtgctgtctttccaactctttggtctgagatttcttctttgggtttaataattcatgagctgttctgccagtcccaatttttgtttgtgtctcttagccaggactgaagcatgtctcttagacattgagtacagctacacacacacacacacacacacacacacacacacacacacacacacacacagagcttcatgaaccagacatgtaccaaatctagtaactaattgtgtggtggtttcagaccctcaggagtcatttccagcccatgggagtagccactcaaccattttcccagccacaaactacacccataagcaaacgtccacatattagctactgttcgcagaaaaaaaaaaaaaaaaactggccagaaactgtggcacaaataatgcaaatctatgctcactctagaaaatattaactcatgcactcatgctattcactgaactaaacacacatcacttgtgtttctctctctctctctgctgtaaaatttgaaaatggaccatgtcttgatctctagactattactttgtgaagtaaagtattggagtgcacatgaaagcaccttctcagaagaaggaagtttcactgctatcagaggaagagaggctcatcttcctgggtgctgtagagtcccgtgtagcttaattttagcatatgaccttcaggtctgcagccagagacagtagcatggggtaagtcaagttttgagtaatatgctggagagaatcactaagttcctggtaagagtctggctcattttctaatctgagctgctttcagacccagtagagaattctatgatgtcatagactgccttgtccccagttgtttccttggtactctgcatggtaccaaaatattttctgagaataagtgaatctgacttgcttcatatcatcattgacctcttgtgacctgataacaggtcttccatgcaaatggtcatgagacaagccagataaaaagcaattgacttctattgtgaaatttctcagggaaatattttctttttttttaatgaagcctacctgattatggtgcatgacctttatgttatgttcttggatttggtttgtgagtattttattgagtatttttgcatctatgttcacaagggaaattggtctgtgattctctttgtttttgtttttttatttgaattccaaacaagattgaattacatgacaatcccagttcccttctccctccctttctcccctaccaaccccccaactaaaaccctacctatcaaatatcctttcttctagtctacacctgactaaacctttctgctccctcatgacctctgcatccttgctcttcttcccttctcattctcctagctccctcccccctcttcccatgctctcaatttgctcaggggattttgaccctttccccttctccaggggacaaagtttgtctattttagggtcctccttgtttaccagtttctctggcagtgtggattgtaggctcgtaatcctttactctatgtctaaaatccacagatgagtgagtacagatcatgtttgtctttttgtgattgggttacctcgctcagaatggttccttcaagttccatccatttttctgcaaatttcaagattccattgtttttttctgctgagtagtactccattgtgtaaatgtaccacaatttctctatccatttttcagttgaggggcatctaggctgcttccagtttctggctattacaaatagtgctgctatgaacatcgttgaacagatgcctttgttgtataaatgcgcttgggaaattttttcttaagttctccgattgtaacatgacactgcagaaagactatgtttaggatttctgtttagatggtatttgtgaatttgtcataacttattcaagattttcctcctcttaatgtctccctgtgttaggctatgtatcaggtaatggagaagctacagtgaaaccacttacatggaagttcccagaaagagagcaagtcttgacctttttcttagcttaaatttgcaattaaaaaatcatgttgatgaggttcctatgttgggattggagaatgcaaagaggagatccttccaagtactgtttggggaccgtgaatactggatgcacacctgtactagtgagagctaatttttcggaaacagagaagcaaactagaattggaatagaagtctgtggaagctactgaacagtgcctttctctgtttttatcataatttttttcagattttttatttgaattagaaacaggattgttttatttgacaatcccagttcccttctccctcctgtcctcccctaccactcccccacacaaccaaaaccctacctatcacttatcctttctgctccccctggatggtgagtccttccatagggtgtcatcagagtctattgtgacctttggaatagggcctaggcccacccccatgtgtcttggctcagggagtattcctctatatggaatgggctcccaaagaccacacctatgttagggataagtactgaactactaaaggaggtcctgtagatttctgaggcttcctcactgaaacctacgttccttgggtctggatcagtcccatgctggttttccaggtatcagtctggggagcaagagttccctgatgtttaggtcagttgtttctgtgggtttcaccagcttggtctggacccctttgcccatcactggtccttctctgcatctgggttccagttcagttcagtgattagctgtgggtatctgcttctacttccaccagttgctggatgagggctatcgggtggcatataagtcagtcatcaatctctttatcaggggaggggatttaaggtagcctctactccattgcttagattgttagctcgtgtcatctttgtagatctccagacatttccctagtgcctgatttctctgtaaacctaaaatgtctagcaattccactcttaggcatatacccaaaagaagcacattcatacaacaaggacatctgttcaactatgttcatagcagcattatttgtaatagccagaaactggaagcagcctagatgcccctcaaccgaagaatggatagagaaaatgtggtacatttacacaatggagtactacttagcagaaaaaaaatggaatcttgaaatttgcaggaaaatggatggaactagaagaaaccattctgagcgaagtaacccaatcacaaaaagacaaatatggtatgtactcactcatctgtggattttagacatagagtaaaggattaccagcctacaatccacactgccagagaagctagtaaacaaggacaaccctaagagagacatacatggtcccctggagaaggggaaaggaaaaatcccctgagcaaattgggagcaccggaagggagctaggagaatgagaaggggagaagaggagggatgcagaggtcatgagggagcagaaaggttgagtcaggggaagaatagaagataagaagaatggagatatctttccaagatctttatcatgaaggggtgctgaattttgttgaagacattttcagcatttaatgagatgatcatgtggcttttgtcttccagtttgtttatacggtgcattacattaatggattttcatatgtgaaccattctacttggtcatggtggataatttttctgatgtgttcttggattcgttttaccagtattttaccgagtatattgcatacatgttcatgagggaaattggtctgtagttctctttcttagttgtgtctttgtgtggtttggatatcagcataactgtagccttgtaaaaagagtttggcaatgttccttctatttcaattgtgtggaatattttgaggagtattggtattagttcttctctcaacgtctggtagaattctgtgctgaaaccttttgtgcctggccttttattggttgggagactatagataacaatttctttttctttggggttataggtgtatttaagtggtttatctgttcttgatttaattttggtatgtggtacttatgtagaaaattgtccacctccttaaagttttccaattttgtagagtacaggttttggaagtgtgaccttatgattctctggatttcctcagtgtctgttgttatgtccctcttttcatttctcattttgttaatttggatattctctctgtgtctttttgatagtttggataaagttttgtgatggggtatgtcctgtatatatgtttctcttattggttgatgaataaaacactgattggccagtagccaggcagaaagcatatgctgggctacaagatgaaaatgctgccgagaggatgcagagaggagcttcaaggagacaccatgtagttgctgaaggagtaacatgctggagccttctccagtaagataagaccacgcggaaatactagattaagaaaatgggtgaataattaagagagagctagtcagtaagaagattaggttgtctgccaaacagtttataaataatataagtatctgtgtgtttatttggggcaaagcagttgtgggaccagttaggacagaacctacatccacaggtttgtctgttttgttgaatttctcaaataaccaactctttgtctagttgattctttgtatttctttgtttctattttattgatttcagtcctcaatttgactgtttcttgctgtgtactcctgggtgagtttgcttccttctgttctagcattttcagttgctctgttaattcagcagtgtgggattcttttcagcttctttatgtaggcatttagtgctatgaactttcctctcactactgccttcatagtgtcctataagtttggcatgttgtccaatcattttcattgaaatttaggatgtctttctttatttcttcattgacccagtggcgactcagttgatcactgtattaatattgtcacttatgtgcatacatgtggagcctagaggatgtcatcaagatgtcttcctcaattgcttcttcaacttattttgaaacaggctctcccactgaacctggagctctgtattttggctcaattgaccagccagtaagtccctagcccaaacccagccctggagtgacagacatatgctgtgtttttcatgcctggcttttctatggtattaggaatatgaagacaggccctcaatcttgaagagcaagcagttaacccaatgagcagttgcttcaacccctaacctacttttggccagacagaaacatgatcagttacctaagacttaatttcacaagcatcaatgtgaccttcccaggcaccatttcccaagcagtgtttcccagatctatcctgacttctagtgttctcttcatcttcaaaattctgcaaggtcttgattctaagcaagcttttggagactagaaactctgaagccataatcttcctaaactaaataatagaggcaaaattagctactcaaaagaatagtacattcttctctgagacactgtatatggtaacgtgaggcaaatgttgagaaggaaaaagccagtatgcccttcacacttctccactccacacggcacttcacaatgtgagaatgatagttgggccttgagaggtggttcagtgtttaagtgtagatgcttctcctaagaggactcatctcacttcccagcataatctggtaacccacaatgacctgaacctccagctctacggaactgggtgctcccttccaccctccatgtgcacctgagctcacaggcacatacctgccacacacacacacacacacaccacacaccacaccacacacacacaccacatgtgcacctgagctcacatgcacatacctgccacacacacacacacacacacacacacacacacacacacacacaccacacatatacacaccacacacacacacacacacataccccacacaccacacatacacacaccacacacacacacacacacacacacacacacacacacacacaccacaccatgcatgcacaaacacaatttaaaatcattttttatagaaagaacagtaaaggaattaatcttttcatttccttaaaaaatagagaaacttttctgttgctttctgttattaatttgctggcaccatatgcaaattacctaagcagcagttgtgatttcccttaataacctttttctggatgtcaccagcaagtggagtccaaattacctttatgtgccatttcctgccttgagatcaagtgtcctgaccacaggtttattttagaaagactgcctattgctgtgtcctttcacaactgggtgtttccctaatgataaagagttcccagagccccacccaggtgtcacatgctggactaatattttcttttccaggatatcatgtaaatttagcccttctgtcacagatatttttgaaataatattttaaaatgtcaggaaacagacaaaagggtacaatgtaatttcattaaatgatttattttttctactcccaagtaataactgtcttcccagaccgtttgggaataggtgggaatagcaggtgggaatagcaggtgttgaaggctctggagatctttcccagatacaagcgcttagattgtcctatttcttaaggctaagatgtctttccacaggctccagatagctgaatcagacacatgaatttcagcctcaggagtgccctaattcctaggaattcatagtgattctgggctcagcctacaggaaactgccttgtttccttgattttaccttgatttcctgaagagtgactcatctctatcataaggattcctattccactattcagttctttgaattttctttgtaacaccagttgtccttgtatttaatcatagcaggcaccacttacgtaactccattatctgagaatatttagcacctatggcaagagctttgctgtgtctggtttagaggatcagagtttatgaattctacataaaaggtattggagacacccatggtgacttacagctttaaacctagttctcaggagttcaaggacaccctggtctacattgcaatttccgggccaaccagggatacaataagagtcggaaaaaaaaaaaaaaacaaccagttattcaggagattagctaaactctgtctcggcaccctcattcattcaatgagactagtaatttcatctctgcggaagactgtggaaaaaaaccatattagtcagagttttcattgttgtgacaaaatacctcacatgggcaagttaaggggaagatttattttagttcactatttagttcagaggtttcagcctgccactaactagtcttattgcatataggcccataaacagacagaaacagagtagtggggtgtagcagagcaaacctgtccacctcacaccaggaaagggaaaggagtaaaacacacacacacacacacacacacacacacacacacacacacacacacacacacgttagcacatatccacttacttcttcacaatgaggttccaccttccactgtcctaccaccttctgagagtccattaaggggctgggcagatggcttagaggggaaagcacttacagctaaatctgaaaacttgaggtcagtccctgacccagacagtagaagaagagaactgattcttgccagctgagccctaatctccacccgaatgccacaggacacatgcatacacacacacacacacacacacaaacacacacacacacacacacacacacacacacacacactaaataaataaataaataaataaataaatgaactaaaatgcttttttaagaggtcagttcaaattttgactctctcagtggattaatccactgatgaagacagcaccctcacgatctagtcaatcactctctctgaagctccacttttaataatgctcccactgaaagttgtgtctcagagagcccagtggaagaggaggcagaaagagtgtaagagccagaggggatggaagacaccaggaaaccatggccctctgaatcaaccaagcaaagtccatatgaactcacagagaatgaagcagcaagcacagggtctacacagctctgcaccaggtcatttacatatatattgcagtttttaagttagtatttgtatggaactcctgaatgtaagaacaaatggatctctgattcttgtgcctgctcttgggactttttttctcatgttgggttgccatgtccagcatccataggatggtttttgatttatctaagtatatttcatgtttggttgtctgttagatgtcttattttctaataagagacagaaagggagtgtatttggaggtgaggggagatgggggaactgggagaagtagtgggaagagaaactacaatcaggatatattgttagggtttttattcctgtgaagagacaccatgaccaaggcaactcttacaaaggaaaacatttaattggggctggcagcttatagtttcagagattcagtccattatcatcatgacaggaagcatggtggcatgcaggcagatgtggtgctggagtagtagctgagagtcccacatcttgcagagaacaggaagtcgactgagacagtgggcagtatactgagaataggaaacctcaaagcccgctcccacagtgacacatgtcatctaataaggccttacctactccaacaaagccacatctcttaatagtgccactccctatgtgattatggggaccagttccattcaaactatcacaccatccatgctagtcagtcattaaaatccataatctggccatatcaaaataaattatttactgggaaaatgaaacacatgctgtgacacagaacttgttttctggctatagtctcagccatgatattcattaagaacaaccacttaatgaaaatccactttagttaacatctgattataatctttcagggtgagtcattcatgaattagtgtgttgcttggaacatggatagattgctcttttataattgaaaatgtagttccatgtattggaaaataagacagcaaatgctcagtgggataagacactcagggagagggtttgacaggaagagaaaggacagagggaacagtggcccagcaggcttttcccttgatttatgaacttatccaatatcttctagtgcaggcaaaggcttcttaagatataaaagatgctctcacaacaaattttgtattttgactcaataaagatgcatgtgactgtgccaagccctgcgttattctgccctcagcactgctcaacaccaacacaaatgagatatattatcacttagtcctaactttaatattaattttgctttagaatgaaaattcagttcagcatagtcattcatcccataatggttaaaaccatcttagcttaaatctaatttatccccacaatatagtctgacattaaataaaatgaatgttgtctttggtataaatgggaccttaaaatgttttataaactagattaaaatgtaagcattgtggtctgaaaataatcactgtggtgctgcagctgtctaagcagctgtattacatggaatctacagctggtcccccacttgctgcagtaaatgtgttgattaaataggtcaaccttaaaatgactaatttgatctgcttaaccactgcccagaagagcttcatattgaacgatggcaattttgttcttatttaacagtcttgactctattgaatagacaagttatgtactgaatttctatcttgaggtatcattatttgtattatttgtttatctgaagaattcagatatattttaatgggtttcctttatatgaggctgttaggattggggacagattgtcttacttatatcttatttatatatccatagtttcccctacataaaaggctaaacttagaactttcttactttacaatggtataaaagtttatctgtagaagcactctgtcttatactttcagtactacagtaaagagactacatgaaatattcaacaatgcattacaaaataggctctgtgttagataattttgaccaactgtgggctaacatgttttgatgacacttaaggtggtctagctaaaataaatgatttggtattttaagtgcattttcaatacttggcacattcaacagaattccattgcagcctgagaagcacctgaatgaggaagtggttactgaaaaggatacaagaggaggttctaaggaattgatctatagggtttctgggctgggaacctcacctctcttggatatttcatactggcaatagaggcaagatttgaagtcttagtcttgagtctgaaatctatagatacccacagtgtgctagaaaggcaggatttatgttctatgattttgagggagaattcattttctagtaaacctcggtttcaattcctagagagacgaaggcaatctatgctacaagggcaatgtctcctatttaaaataatttcaattatgcatgttaatcagatctgccaaataatatcactgaaacatatagtcctgtgttggaccaaagaagttggtactagaacctagccatgttgacataaaattaactgttgtagttggtcattagaatcaaaatattaatcagcaagttgctgctacctcttcatcctgacaccagcaggtggagggcaatccttagaagtcagagaccctactactttgttgtagcctattctatctgaactctggtgctgacctctgtggcctgttgttactaatggattctgcatgctgctcattatctcatcagtacttggacactgcccaaatgcctcaagttttacaaatattttctttcctaagttttacccccactcaaaacagacacaccatttataagaatttagcatgtgtcctgagcagaaagccagacaagttttctatccatcctactcaagagaagtggcccttaacatctttaatttttttttttgagacagggtttctctgtgtagccctggttgtcctggaacttcctctgtagaccagttagcctcaaacttatagatatccacctgcttctgtctcctgaggctaagaataagggtgtgtgctgccactgcctggccccatctttaaattattttcaacttcagtcagaccagttttgttaacttcctctgcttcttgttagtggcctgaacccagaactaccactcagtgtcgatctaaaatatcccgaaggacaggatatatgtggagtggtgactcctgtctgtagtggcagttggtcctactctagaattctttcaggagtcaattactatacttctcccattctgtgaggcttgaaaacacatctttcctcctcatgtgtgcctcttctggttgttttcaattggaagtgctagtggacttcacattcctctgtcacaccccttctctcttcttgaacccatctggaatttattttgttttaaaataactaagaaaatacaagaactgaaaaactccagttcctcagttaagatttccctcttaattgaagctctgtctcctctttccttttataaagggattttgtaatttcatgatttatgtttctattttcattttgatgtcaggttgaagggatcacagactgttttcaggggataaatatttttcttgtgtggctttgctttaatgtttgcttttattagattatgggactagtaagcatgtattcgaatgttataatgaatgcttcaaaagttctgaaagggatgtccctaataagtgaatgtgtacatctttttgaatatgtgtggacttatgatctatcttttaaaattcttatatttttctctcattttgtggtattttctgtcttgagacaataaatatgaaataatattttagaccatgaatatatttttctatttcctatcactttgatttatggatatcagtgctatctacttggattgtgcttttaagtatttatttatttacttactttttttttcagacaacatttctctgtgtaacagccctggctatcctgcaacttgctatgtagaccaggctggccttgaactcacaggtctgccagtctctgcttcccaaatgctgggattaaaggcttatgccacctctcccaggctggattgtgctattatgaattattatcataagtacacttgctttccgttatagtaacaggtatctgagatagtcaacttcaagagagaaaaggaacttctggaggcatcaccatccctgacttcaagctctattatagagctatagtcctgaaaacagtttggtattggcacaaaaatgggcaggtagaccaagggaattgaactgaaaaccctgttattaacccacatacctatgaacacctgatttttgacaaagaagctaaagatatacaatggaatgaaagaatcttcaacaaatagtgctggcataactggatgctagcatgtagaagactgcagatagatccatgtctatcgacatgcacaaaacttaagtccaaatggatgaaagacatcaacataaatccagccacactgaacctcttagaagagaaagtgggaagtacccttgaacaaatttgtacaggagacagcttccagaacattacacaggtagtcagacactgaaataaaaaattaataaatgggacctcgtgaaactgagaagcttttgtaaggcaaaggacagttagcaagacaaaatggcagctcacagaatgggaaaaggtattcaccaaccacacatccaacagagggctgatctccaaaatatacaaagaactcaagaagctagtttctaaaacatcaaataatccaattaaaaagtggggtacagaactaaatagagaattctcaacagatgaatctaaaatggctgaaagacacataagaaagtgctcaacatccttagccatcagggaaatgcaaatcaaaacaactctgagataccatcttactcctgtcagaatggctaaaaacaaaaacaccaatggtaatttatgctggagaggatgtggagaaaggggaacactcctccactgctggtgggagtgccaatttgtacagccactttggaaatcagtatggagattcctcaggaaaatgggaatcagtctaccacaagatccagcaattccactcttaggcatatacccaaaagaagcacattcatacaacaaggatatctgttcaattatgttcatagcagcattatttgtaatagccagaatctggaagcagcctcgatgcccctcaactgaagaatggatagagaaaatgtggtacatttacacaatggagtactactcagcagaaaaaaaaaaaaaacaatggaatcttgaaattcacagtgaaatggatagaattagaagaaaccattctgagggaggtaactcagtcacaaaaagacaaacatggtattcactcacttatatatgaattttacacacagagcaaaagattaccagtctacaatacacaccactagagaagttaggcaacaaggaggattctaagggagacatatatggtcccccagagaagggacaagatctcctgagcaaattggagacatggggggaagggagaaggagctaggagaatgagaaggggtgaagagaaggagtaaggaagacatgagggagcaggaaggttgtgtagggggaagaaaagaggagagcaaaataagagataccatcaaagagggagccagtataggtttaaagctaaatcaggcactagggaaatgtccagagatctacaaggatgacactaactaaccatctaaacaacagtggagaggctaacttaaatgccctctcctgataatgagattgatgactaacttatatgccatcctatagcctccatccaacagctggtagaagtagaaacagatacccacagataataagtgaactgaactggaatccagttacagagaaggaggaatgatgagcaaagtggacaagaccaggctggtgaaacccacagaaacagctaatctgaacaagtgggagctcttggtccccagactgatcactgggaaaccagcataaatgtgggtctcagtgaagaggcctgggaaatctatgggacctcttgtagtagatcagtatttatccctagcataggagtggaatttggggcccattccacagagggatactccctcagccaagacacacggtgggggtgggggttgctaggccctatcccaaaggatatgacagactctgaagacccccatggaaaacctcaccctccctggggagcagaaagggtatgggataggtagggtgttagtgggggggggcaggggaggaggggagggagagggaactggaattgacatgtaaaataatcttgtttctaatttaaataaaaaaaatggaggggaaaaaagagagaaaagtttagatttggctacagttcaaaaattccagactgtgattgttacttttaagcctggagtgagtcagtacacaatggctgaagtttgtgttgtagaacaagctgcttaccaggtgattctagaaaccaaagacaaaggggaaggaggaggaagaggagggaggagaggagaatcagcagaaaccactgtgagagcaattttcccagatcacacctttctagaaccagtttgaaagcagcaatgaagaatcaaaaacacagtgcaggagtcatgctgggtcttttctgccttctgttctcatgcccttttgggtaagtccttcagatcttgtttgtttgcgcttgaggccggagacatttatggttttaccagtttcaaactgaagcagaaagtagtctttgggcgtggattaattatgtatctcaagattatgggacattgtagaaaactggagtaggcctgtctggggagttttggaagcaaattccagctgcaacagatgggaaaagtccttgtgagtgtgagtcactaagatagaaatgcacaggatgtgggatcttagtgttcaattcatcttaccaggtgatgagtgtcgtctactaagatgaggcttccgagtgtccaaggatttggaataagataactcctgggatccacagaaaccccaagaacattaagaactcacatttggaaatgtgtatttgccgactgaattgtacctgcttatactttacccaaaatgcagccaatatggaaaaagaacaaagggggtagactcaggagaccatctgagatgaaatataggtaatgatcagaaagatggctcctggtcatgggtatcagtgaaaaagcaacatggaaacctagtctcattttgctttctcttgctggctctttactgttatgtctcaatttaaaaaaaaaaaattcaccagatactagactttgtcgtttgctcttccaggaacttgttttggaggaagaagatagttggagttaaatggaaaatttaatgtcatgggaatctgccttactatactctggcgaaatctgtagctatatgaaagtcagtgtccctagggcaaccctcaaactgtggatcacaggagcttgggaaatgtggaatcactgccctagcctccctatgtgctgatggcacaatcctgaggcacgattgatcaccaactagcaacagttctctaattattaacacccagtgttggctttttctctcctttcccattcactttttcttgcctactcttcctggagtcactcctaagtaagtcccatgccccacactcttctctagggagtattttttgagtgctgtttatgaactttctctgttatctccgcatgtctctccctttccacattccatttcagttcaattttatctctttaatttctctgggctatttattatttttatttttcaggcagggtgggaaaatagctgtgtcctaaactcactctgtagaccaggctggcctggtcagaggtctgcttgctcccccctccttggctctgggactagagttgtacactgccaaggccctgcttgctattatctgggttaccctgtttccaaccataaactgtatagacagaagatgtttccatagaagaaagacttccaggaaaactatgttgattcagaaggctatttgggaactctcaggaaggaattttcttcccagcacattgaccaccaatcctatggcttttagtgaacaatgaaaagataatttgcagtatacaatggaaaatacatagactggcatcaggtagatctgctattaaatcccagctttgtctcttcctagatccttttcctggacacccaacttcactgtttaattctggtttcctcatatattagtaaaatccaaatgaagttagttttacttttttcaaaatctattttctgtggagaaaggtgacatctatagtaacaagggaatagtctcaaaaaacattcagaagaagagaccatttgtaacctaagccaacacttttaaaaatagcttttaaaatatctactttgaaacaattttatgatatataaacttctctgaagttcccagtgtttccttcactgagaactatcaacatcaaatattcttgaaacatttttctgaattggccttcctcaatagtagtctaatagtccttttgttaaagtttcaattatttttctttctttgggtagggctcactcccctcttttcaagagtgaaacacttaacattctttgaacctcagaagtcttcaggtatgtctgtcaattgccccatatcaagtccacaactcaaggccccgagcaaagccctaggactctcttagaaaacaggaagggaaaatatcacatgaataaatgctgagttcataacgtctggaagacaagagaatggactgccaatatttacaacttgatagttttaattgtcaacttgacacaatctacaatcacctgagaagattattccttggaaggactgtctgcgttagattggcctgtgggtatgtctattagggattgtttgggttgtgttacttgatggggaaagacccagcctaaaagtgggcagcatcatcccctaggtcctaattgtataagcatagttaggaagcccaacactaggcatgtgcacattcatttctgtctgctcttgactgtcagctcaagactgccttgacttccccacaatggtggcctacaacctggaaatgtaagctgaagaaaagtttctccccaaagttgctttagtcatggaattttatcacaacagaagttaaaacacctgggtatcttttatccttgtcaaacaaaaattagataatgtacttaagatataatattgccaatactgttctatgagaatatgatgaaagattccagaataaaaggaacctataaaagtgatttgttatgtcttaactcactttctctggaaatgaggtcaactaaataaactacactggaagtcaatttaaagcattgagctctcctcatgctaattaaggatgtacgatgtatcttctccatttgagttgttgatccatttgggttttaaaagccacagtaattaacatcagacttttccttgaatagaacatgaaacgcttatttcataattagagttttcttcttatttgacctgtctggttttgttcatcaattataacaacaagggtagacaagtgtataattaggattttttaaattatctgtcatagaaattgacctgtatgttatttttatgacaactgacaaaatacagattttaaagagggacagagtaccacaaattacttaaagattttatttttaaaaatttctgaccttagggaatgattcattgaattgtctctttgactttaaactcaatggatcttagctgccctatttcttgtgctatcaaagagaaccaatctatacataccatatattttaatgttacctacaaaactggagaaagtattggcttaatcatctgcaatgtcaatactcatagccttgccttgtggagaaggtataacagatatcatgttgtgggcacgagggctaggcttatacaaacttgtaaatgattaaactagaagtaagaaatggcatgatggctttaggactctgatccattcagtcctgaatgtagaacagacattaaggagaagggatattccacagaatttccagtagccctaaattattttgggtgtaagtagtgttctaagtctgtttgcttgttacttcatttatcatgaatcatccctttgggcatagtgaacttagaacataacacctgctgtaacaatttttttgtcccaggtgactaatattgttttttttttcaaaagatgtttattggacttctttgaaaaggctttgagtgatttttctatgatttttctattttcttagttttagctgaatcatctgcagtttttcattgggcttgttgatgcatggcatcagctgtgactgttttcttcaagttctgacatgtgtgtatacttgtctgggattgtatatgaggacttatttaggcaaatgggttctcttagttactcttttgaggtcaatatgaacctaggttatattatcctcaggttttatctttgccagctgtaatttgtgtggctgctggagaactggcttggcaattaagagtacttgtcctcttcttaacttaaagagcacccatgtttggtttccagcactgtcatggggctcacaagtgtctgtaactccagtcccaggggattcaatggccttttctcacctccacaagtattaggtatgcacatgatacacatacatacatacaggcaaaatattcatgcacaaaataaaataataaaaattttaaaaaggtttcacaaaagatgtgtactttatagactatttctgtaaccattaataactagcatgattgattgattatgtatgcaataagaactatttgttatcaggtgtggttactgtagtcattacatgtatttgtttgacaagtgtttatggtggtgtctggcatgtgcttagtactaatggcattatccactcagtaatattaacacagacaaaaagtctacccctccttggaaaaaccagggaacattttatgtaagatggcatttacattgagtgctgaaggatgtgtggctgttttctgagaggaaagttaggggtgggccggggatttctgaacaaagagagccctgtggataatgacacagaacttcagctgtctactattttcaggaaaattggatccaggctcattccactctacaagctgcttttcccacattgaaacaaatctattgtttttcaccttgctcatcaatgtaactaacaacatttctacatatagtttatccacggcctgcttgttttacatagtgataagctaacatgatcagcagaatggcaaattcttccaatttccattgttggttctcttctccagatgatcttcatggaaggttaaataagtacttgcgtgtgtggtcatgacaggaccttgggttttcttttctccctaaaaagtttcctttacagtatatagttattaaattctaccctttcctcctcaagcccccacaccctctctaatgaatgccatttttgtctccacccagaactaaacttattttacagttctacagccacagcaccattgagaactgggtgtgccttaccctttccctttccctcactccagctgtgccttgtttggttgggtcattttgatcatttccatcaacttaaccccaacacttgtctaggcctttggttaatggctgtaggaaacattcttgtccttagatgtgagttgggaaaatgctgctcttgttctgctcacagccatccaaggcatgcaagaaggtcttgctgaaatagtcgtagagatatagagcttaaagactgttcaaaatgttcctaaagctttattatttactgagggttaatgctgcttcatcatttaaggtattttgaactctgtttcctattatttcaacagatttatgtcaacagtgcatccaaactgaactggttggctataccaacctgtaatttccaattgaatccttggcaagtcccccttggaggctatcttgtgagtgatttcatctttcaattttgaaacaggcatggcattgcaaagttaaaaaactggggatcttagtaaattctattatttattttaaaatctgattcctggctccatctcagtgttcagagaatctcactgaagtaagagatctcagaacttttagtacagtcatctaggtattccctttgtccccaggctggtaactctcctcctttgcccacaaaattccctggaaagatggcatcgacatatgattcagatttttgaaaactatagactaattgtcaatggtataatgtatttttatggcatagtaataggaaatagtgatatttatattataactactacatgctggtcactggttcaggaatatgtaacttgtttaactcatatttaatattactgataatcctgctgagcagatactattattatccatattttacaattcatgaagctgagacacagaagctaagaaaacctgaacaagatcagacatacaggaaatggtaaaactctggtagctaatctcagactttatgctaaacaaatagacaaatatgacaaggatttcttatactaaatatataatgtcaaattccttagaggcatcataatcacagagttcataaatctgagcttttgtggtctctttgatggttttgtggtgatccatcctctcaattctattccacagcccttgggaatagccaatccctatttacaaggttgctagcaaacagtaggcctgccacttatctagaagaggaagctagacagcttatttctagcttcaaacctctgaaccttggtttaaaaacctctaagctatgatcaataaatgtgttcatttgaaaaaaatcacacttgtaatttctatataagaaagctacatagttgttacaaatggccaatatgaaaaaacctgatatatcaagtattaataaatacatggattaatcaaaattctcatatactgccaataggattaaagtttggcacagctatgctgaacagtttctaggtattgtttacaaataaattcttatttgctcattgggaaattccattggttggtgtataacaaacacaaatgtctgtgtgttcaccaaaagacagtcactagaatatttatgatagaagcacctataaagtctccaaacccaacacaacaagtgaataaaatgtgttatttccatttaattgatatgcaaatacatggaaaatatggactaggcacattggtacagggttgtgcaaaagaagtcacaccaaaataagtacatcatgagttaagccactttctgaggtataaactctagttttatgtcaagctgatacaagctagcatcatctgagagggagcctcaattgagaaaatgcctccataagattgggctgcaggcaagcctgtagagcattttcttaattagtgattgactggggagggcttagcccacggtgggtagtgtcaccccctaggttggtggtccttggttctataaaaagcagggggagccagccattaagcaatacccatcagtggcctctagatcagcccctgccttcaagttccttccctgtttgagttcctgccctaacatccttcaatgaaaggacaagtcaattaaactcattctttccctagctgcatttgatcatggtggcttttttttttttttttgtaatttttttattagttcaaattaggaacaagcttgcttcacatgtcaatcccttctccctcccctccccttcctctccaccctcctcatccaccctccactccccaggcagggcagggccctcgacagggggctccccttgacgggggctcaccactttatcctgggccgggcctaggccctcccccatgtgtccaggctaaagtgcatcccttcagctgggatgggctctcaaagtcccttcttataccagggaaaaatactaatctattaccaggggccccctagagtgtggaggcctcctaattgacatccgtgttcaggggtctggatcagtcctctactggcctcccagacagcagtctggggtccatgtactcccccttgttacaggccagctgtttctgtgggtaccagcctggtaccaacccctttggactccctctctgcaactagattccagagttcagttcagtgtttatctgtgggtgtctgcctttgcttccatcagccactggatgagggctctaggatggcataaaaagtagtcatcagtctcattataggggagggcatttaggttatcctcttcatcattgcctagattgtcaatttacgtcatccttgtaggtctctgtaaatctccctagtgccagatctctcctcagacctataatggctccctctaatatggtatctctctctcatcctgctctcctctattcttcccccaactcaatatttctgctcctccactctcctctcctctcctctcctctcctctcctctcctctctctcctctcctctcctctcctctcctctcctctgccctcccctcccctcctctcattctggaagctccctctcccctaacctcaagctcccaattagctcaggaattcctgtcccttcctgttcctggggtccatgcatttttcccttagactccttcttatttcctagtttctttggtgaagaggattgtaggtgttttatcacagcactagaaaactaagacagaagctggtaccagtgtaaatggagttcttaattggtctaattaatgaaaacccagagtcagatacagagggaaatgctgagagatcagagagaaggaggaagcggcagctacaccttacctccttagtgtctcggcagacaagagagcaagttcctgtttttccctgcttgtatcctgtttcctgtgtgtctgacctgcctccagacctgtatggttaactaatggcaagctccatcctctgaccttcagacaggctttatttgtacaagtgagatatcaccatataatcagcatatatctcctttttttttttttttttttttttttttttgtctagcgtggggtattagtgtaacagacttgactgtatggttttgctacttcataactgtaagtttgctattgttatgaatcataacataaatatctgatatgcaggatatctgattagacccctgtgaaagggctgtatatgtgacccctgtgaaagggtcatttgaccccccccaaggggtcacaaaccacagattaagcactgctgcctcagaggatactggttacatgggcatcagcttgtgaaaacttactgattgtatattgatggcatgtatacccttctataggtattgtttacatcaacctcaaattataaaagtatatgtgtatattttttctatacttttctcagtaaaagtggaaactgtcaagctgccaatacagactaagtttaagcctgctctgcaaatgtttcatgacactcaaaatgtaactgggctagattcccagtgcatcgcccatatgacagttaaatagactaccatggatatttaaaatataactttttcagattctaaatgtttggattttaaaaagtcaaactgacttccgatataatttaatttgaagtgaatttttctttttttgtactcctttgcgggctaaaggtgtgtatatgttcctttggtgacatccctcctgacatgactctgtatgctttgaaaataatatcaccagtttctactgctccctccttttcagcctaagaatagagacatttgctggtaattcattttctctgtgtcataacgttttgcaaacaggtttgtaatcaattccttgggattcaaattatctttcattgactaggaacttcttttgtataaaataccattcttttctatcacttaatttaatccttattacagccatgtggggtggatatttatcttcattccagagacaagaaaatgatttgatgatttgggatttatttatccagccagaagtctcatgccaaaaccagagcctttttgtaattctgggtggctttcagagatgttcttgcagagtccagcagagctaagaaatggaggaggcagcagacccacctggtgttctcactgaaccttcactttacatgtaaacttctgcaggtgtgagtccagacaggcagctatagggaaaggaaatgggcttggaagttccagaagcatggggggaaatgtgtcccagtgtgttctttcctttccaataagaataagggatacacaataaagttctgtccaagtttgtcttaccacccccagaattagttacaattttggctacctaatttcagggaaatttagcggtcttttctcttctgtacaaaatgttgatgagaaggagtaaaccatccggcccttttgtcctgtgatcttgacctctggatttctgaagaatgcgctcatttctctttgtcaccaactctgctggaactgcaggcaaaataaattgagttctgtaaacagagttcagaaagagacagtttggttccaggaaaggatccatgctgcctctttattgaacatggcttgagctggcagccttaggttctctgggaagcccctgagctgcttagagagctgattgtacaaaagggtaattactgtcattaaaagcaattactgttgggctcctgagtgacgctgtgaagaagaaaatatttattaaagtttgatctgtatatttgaggaaaaactagaaacccagagatggtagcaacaacaacaacaacaaaagcagtaaggaaagagaagaaaaatgatcaaatgattattatttattattattgaggtgatttatgttttattgttgatgctatttctttttcaaactaaaacaaactgggacaaataatagtggagccacttaggtatatagggagttttcaggtccttgtcacttgggattacaaccctagcttgtttccactactaaatattggtttttagtatttgatttatttaactgatcggtctgataagggtttttgtttcctcccttatgattcactgtcttatatttgaattaagcaatgacaagacctttgtttaaaggccaaccttcacagacttttaatttccctctggatctcacagctagcccccaagtagttcccattataacagctgccaaaatgctttcccaaagaggggccatagatgcagagtcttaagtccagcagggctgtgaccgaagcaaaaagcctttcctggcttgggacttgtaaacgtttggtgagctactgaaaaaggattaagtaatcgttctcatggaaccaaactgaagtgcatccggacaactgctctttttgtaaatgcttcttgaagagataaataaatggataaagcagtatgtttatctaaacttgctatctaaattgagaaaactaggtaacttcttggttctccttagacttgtgaaccccgctgggctctgcagttatttccatcagaacactcctctgtaatttttctttttctttttaatgaaatattccacttaggagagattacaaatgaatggtatctctgagctgaatctacccatgaacatgatttttctgacttccacaaactttcaaattgttttaagtaaaaattctaaagctagaaaagtcttcctaaacatctaagttctgtctaaatacataagtcttagatcttcgctcacaaagtctgcatttttctgcactgttaagcacctagaacagaatagcaactaaatgccatggacaaaggtttgactgtgtactttacaacagtccatgtctgccctaaaaaatgaagttaatgactttgttcgtactcgggcatctgtactggcctgtccttggggttctgacaggatacgtcctcagctgcaggcatgtggagcaccacctgtgcacattcactgttaccttttaaagggcctgcccacctcccatccttctctttctctttgtttctctccctctctctgtctgttcctctctccatctctctttttctccctccctttctctccctctctcttcccctctttctcctctcctgctgcccctgtctccagaggctggtctcccccacttccctttccctttttatgatcccttttcctaattaaaaagaaatccctctgctcgaaccctgttgcatggtgtctttctcttgcatgccatgtttcttaaattacaacagacataattttcattgttatttttcatatatatatatatatatatatatataataaatacatacttctctaggtcttgaatttagactgagctgtgtagttcaaaaaattcctctaatatttttgtgcaagtatgtgtgtgtaaaagccaatcttttaaaaaaacacttcctggcattttgacatttgagcttaaactttttcattgctgtttcttctctgtggtagacatagttttttgttattgctctggatattttattaaagccagaatagaaacaaaaatccttgctgtttataaaataaaccttctttaatattttttgttacttttttttctgtcagtaatttggtttcatcaccccaggctggaaacttattagggatggctggtgtggaccaagaactgagacctgggggtacaggatagttctcaagggtagatagtccaggcatctgggctcatactctgtgtgtgtgtgtgaggcaaactggagtcaaggtggaaggtgaaaacttggcaccacaattagatagccaccaaggtggaccagttcaagagatcaggaatctcaaatacaagacatgttcaacatctgcatcccattaaagttttcaggcttcataagcagaagtttgaggccacatactgtttttaagacaaactcatttacctcacactggaaacagaaatttatcacattctaattcaccctcctaccagttaagtgtatgtgtacactctgatgattaatttacctttttcttaacataaaaataatttaatatataatacacacaagtatttgacttattaagttgttttttaaataagtaaacatgtcatatgtctgacccctagatacataactaaaatattattgttgcatttattccccttccaagaactatgaagggatataacaatattttagcttcataaaattgattaatgcagcatgtaacagtttctttattgaacccattcaggaaaatcatcgctacatgttgcatgtagctccttcttatagtttctgtatgaaaatgtctaacttacgtattgattacactcatgatggatgtttgagttactttcagtttgaggctattataatgttgaagaagcattcagtttgtgctttattcggataaggattctttcttcagggtacatgaaaaatgaaattgacaccagattgggcaacaaaagcagataggagaaggggtaagaagaagagagggagaaagaagaggaggaggaggaggaggaggagaagggagggaggaggaggaagaggaggaggaggaggaggaggaggaggtaacttatatcaccatgtatttccacaaagagcatggaggagttctggctagtctgtaagatcactaaatcttgcagcatttcatgttgtctgtttacttgcttgcttttattttagctgtttgtggttgtaaaatacttgatttgtttctattggcatttgaacttgtgaaattgaatggtgtcaattggtcatttgattatttcctcactaaacttgactttcaaggagtttgctgacttttaaatattgtatttcctgatttgtttacttttatttcagactgtctttggaagtctatgtgttctagacttgagttttttggtgctatctgtgtagcaagcatcttattgaattttgtggctttccatatctctgccttaatgataccatttcataatctgacctttattatagtttagtttagcaacacatttttcctttatggtttgtgcttttcagtgtgttttgtttagaaaatctttatctctattgaggtcataaagacattcttcaatgttttaaccccagaaattcataattacaactatcgacctagatatgtgcttatttggaattagtttggggctacagtgagaaggatgtgagcatctgttgggaaacattattttaaggtgtgtgacttttatttccattgcatgtgtttaacactgtgaaactgtgttactgtgcctgtctaaaacacctggtggtcctaataaagagctgaatggccaatagtgaggcaggaacaagggtagggagggctggcagacagagagaatagaaggagaaccaaggaagcaaccagacaacaaggaaaggaggatgtcaggggccagccacccagccatccagctacacaacaatccatggagtaagacttagatttacagaagtaagagaacagttaaagcccagaggcagaaggtaaacaggttaatttaagaaaagcttactagaaacaagccaagataaggttggacattcataactaagaatagtgttgcttgggagacttacttgggagctgggtggtgggcccctcaaaaaagtcaaaagaggaaaagatatttaatgatacaagcatacagatgtttttctcactaataccactaaaaccatttagctgctttagaataattcttgacatttaataaattgagccactaggtttgtcttccacaatgatggcttcatgggtttccaaccttttatcatctacaactgttttggatggaccttgttagtaatttttagattattgcatttaaaaaataccctaattaaatttttatttttacatttacaaacacatatcggcacaagtgagcactcatgttaaggtcatagggcagcttttagaggtcagattcctcctcctaacacatgccttgcagggatggaactcgggtctccaggcttggcagcaagctcctttacccatgaaaccattaggttggcctgatatctgtgcttctgacacaaattatagaggtatcttgtcaacatttacatatgcacacttatacacctgcacatatgcacggatttgcttcgattttcgctggactggatataaaactatagatcaatttgtagagaagtaatattttctaatatagagtatcttatctaataatgtgctttcagtatttgtttattaggctttcagccttctcccaaattctatttctctaaagtactatagtatcttcatgaaatttacgtgtaagtccttagtatttatcaccacctcattaatatagttttttctgactgtataaaaacagttatttaagacacaaaaatttaatctgccaaaaataaggagaaaatcaataaaaagtcaactatgattttaaacatatcatcataatttttgggaaatatcatctaatttactataaaatatgggtcatgtgatatgcttgtatatctgtcttttcccttagtactacaaagattatattcatctaaataaatttccatttaaatatattttaaaatgaccaaatgaattacttgatagcattctaatattggtaatttagttttttcatcagatttttttctattctgagtaatcctgtggcaaatatccatataacatgtttaaaattattgggatagagggtgggtaggttcttagatgtctgattcatatttccaactcattcttgcaaaatatgaagatagaataatgaaagatgcaggcagcatcataagataaatctgtttctctgtcttcagaaacaccacatgttaggagctcacatttggtaggctttctcagagatacagacgcatgtttcattaaggttgtgaaagcacaggactgagtggcatacacaacaaatcagtcagtgatgatactttacagtgggtgttactccatgtcctatgtctcatgacatggtggtggtttggacatttcgatctttgcttttcaacttctaagccaaagaagaaaagacagagaagtgagatttataaagaataaaaagatgaattgtagtccataatgtttaggggttctgaataaaattcatcgttgactccaactttattttcctatcacactttaagggaacaattatgcaagtacctgtgtgcacctaaatgtttaaagtgcagacatatttttaacaatttcttttttttcctctgaggttattcagaagagtacattagtactcatgaagctattcagtgcaatattgttgtaaccagggatagagggggaggaggaaggaaggtttgggcccatagcaccacaaagacaatgtgttttgtaattatttcttcccttaagccataacattctcccaaatctcaggaattatgtggcccctccccacaaataaacaaggaatgaagacttgatagggagaagagactataatggatctgactgcaagctgggcaaggagagccagggatgcatctttctcaagttgtcactttagttgaggttagttttgtggagattcagctttcattgcatcatccatgctcctataagtaactctaactcactggctcattaagcttgatttgggttgaattatttctttggtctgtcactgatgtccatctctggtaaacagaatcatttttatttcacatttccttagggaaagccattcaataaaatgccatggtaagctcaagatgggcaagttcttgactactgttttgaaggagacattcatgaatgaatggtcaagatattatagaaaatgctaagtgaagaccaatgggatgtcaattagcatagattctctgttatagagatatgtgtacagtgatttaacttctgcctgacattatgagcacatagaaaattatatttcacctttattaaatacttaaggaaaaggctatttgtgacttgaagcaattaaccaaggtcctctctggccaggctccccataccacctctacactcaacttagggatgaaaggtcagtacctcaacacatctatcatccaatgtgacaatgtcttaacccgatatttatattagtatattttgtttcctaagaaaagagggagaaatgcagggagcatttattgtggggtacagcagatgttgtcagggccctttactcttctgggaactttcctgtggtccatacaaagaatctctggcatcagcattacctcatgggcacaagtttcctggaatccacacagctcatgagtgtaatgataagtctttctgccagccgctcaagttcttttgatccaggcaggaaatgacatagcaggccaactcagaatataagcagggacaagcaggaagtcgtgctcttccttcttgtctcttttctggagtcaccatgtgagcccaacaagagaggacaaatgccactggcatccttgatcagataagtctttaaaatatatagattatggctatggttgatacttaagacagagcaagcttataaggaatcctagtcattggccagcagcattgtacttaatataagtctttgtgtattatttggggccctaacattgaggcggaactcaggcgggtggcggacttattacacatgagtgataaatacaaacttgagcagtttattttgtgggaaaaccaaagttcttaaatgttcttattcagtgagctttctgaaacagagacaaacttgcctaactgcccctgaagactattgtcctcgggtagacagccctcctgcttgttctttgtctggaagacttgatgataaaggactcctgtagcctttaaagagagtgaggccccagcgagaagtacaaagtaagatgcagttatcatgtacaagagtgatgctgagagtgttggtggagaatggagaacaggcattcaagagacagaagtagttgggacctaaggacgttggcttaatcacactataaatggacaaaggaagaactctctctgcttcaatcttctctatgcctctcctcatttcattgatacaggccaagaggtcaaggtcggggagcaagtcagagatcagagtctttggcttccaggagccagcaaaaacatggaagaagagagactttctgtaaagacaaccttcctggataggtcttgctttcaggtatgcagttattcctgtgatgtaaggtgagatgtaatgtgagcaataaataaaacacaaagacaagtacatgtttatcaaatgcttactgtgtaccaagaactctgtcaagtgaatctgtactttttatagaatatggtgctgtctctatacaagctatagtcttgattacaaaaatcatttgattacacttcttcaagaccaaggtgaagtttattttgtggtagactcataatctgtgtgataaaaaattattctggagggatttgtttgaagtaatatattggttggttgcactgtggcttcttgactggtaactggtaactagaaaatgtggctagttacaggttttgtttcatgagagggcaagtctagctagctatagcacactagcaggagttgatatgtgtgtgtaccagagatagcatgttccttattctgtaccataggtttttattgcttatgaccaattaggaaaggtataagaaactgatgagagtgatagaaaataagtagggtaaaatttggaaaagattagcagaagactcttaatcagacattggctagttgtttcctgagaccaaccacttttcatcttctcagtagcctttatcccaaccctaagtatgtgctgttaaatggctcctgctatttcacaaggttaccttcatttttagtcctaatactcttttctgcatttgctgtcagcacatgcacttataaggaagagcacccaatcaattaagtcaattatcaattaaaccaattctacatggcttattggtgcttggttctatctcaatcgaatctttttctgcttctgtgcttttttcagtttacaaatgttcactgacttattcaagatagaaatatgagcaaaagtgatgcaacaatttttctcactaatactcactaaatatatcactttgaatttagaaacaaccatctaaggaaggtgttgtagagaggataattcttggtggccgataatccttcctgagttaaggccgtggatcatttgagctatgactactaaatgtaattgggggccactgcattaagcagattaaattccctctaaatgaagccaaggaaatctggattttttaaatttatttttatttaaattagaaacaagcctgtttcacatgtcaattccagctccctctcccttcccctcccctcctcctccactcattaccaaactcctaccccacccccctctgctacccagggagggtgaaccccctccatgggggaatcaccaaagtttgtcatattatcccaggcagcacctaggccctcccccatgtgtccaggctgagagagcatccctcctcatggaatgggctaccaaagtccattcatacgccagggataaatactgatttactaccaaaggtcccatcgattaccaagacctccccactgaggaggttcaggggggtctggatcagtcccatgctggcctcctagcctttagtctggggtccatgagctcccccttgttcaggtcatctgtttctgtgggtttcaccagctcagtcttgacccctttgctcatcactcccccctctctgcaactggattccaggagttaagttcaatgtttagctgtgggtgtctgcctctgcttccatcagccacctgatgaaggctctggggtggcatataaggtagtcattaatctcattatcgggaaatggtgtttaaggaaacctctccactattgcttagattgccagttggtgtcatccttgtagatttttggaattctctctagtgccagatctctcctcaaatctacaatggttctctctattatgatatctctcatcctgctcttaacatagtcctttcatggtttttatgtacttgaatgttgttgaatatttaaatattacggttcccaccttaaggaagaaatcctttggtgttgaaggagttaatacacatctgtaaggaacatctgtatttcccactctttccatcagtggcctctaacaccctttcagagtgaaggagaatctactctctttatgtcagttagggatgggttgggagcagaaactggttccttttctcctgggtttgactcacacaagtgaccaagcatagtaacctatactttcactgctgcatcgtggtaaccattctcagaaggcccaaatggttaggcaggttctctgaaagatgcacacagtatggctggatatacagaaggacatattcaataaagtggcaggcacaccaagaaatgtgcgtgggtcacagtgtgaacaaggaagacacactaggctcattttatttcagagagaaacagaaatgccttgagaatttcagcaaagaaaatgcagtgaatctgtaagaaaccaaaaagcaagcaaaatcccatagtatgttctaaaaataaatatttatgaaagactatattatataagcattggtataaaatgttatgcctttgattctccttaattttgtaatatttttaatcattcatattatagttttcataattatccccacttaaaagattaagaaactaaactgataggattcaaattatttatttactttgtaaaaatgtctttgtctcatagacatctaggaagcacttagcagatccagctttcccatgattccagagcatgcccctgacttcaggatgtggatgttctgagatcactactgctaaattttatacaatatggtttcaaagcatgccagtgtgaaaatgtaacttgtgtcacattgcgtaagacaagcatgagctattccacgacacatttctgtagaaaactcaaggattagacatgtcaatgcctgtagcttgcatgtttccggggcttcaagtagaagtatggacttgagtagagactaagtactaattgacttcaaagatagtttcataaatacagttaaggcagaaacttaaaaatactatttactcatattaatactgtgtttattgaaaatttgcagtatgtaactatttaagtcaccagatcttgctattctaaatcagattaacacacatgaaggtctaaagaaacccagttggggagagaagatatgaaattgtacagtgattagggataaaacctggaaggattgtggagttgggtgttagggtattcagctgtgtgaatggaggaacgtgacagcaaatgatagtgagagttggttagacactaagatcaaggcgtcataacattatcagaaacaaaataaatttgagctcctaatgattttagaagttctcgagggtaaataactcactggagcaatttttcacatgtgtatatatgtgtgtattctgtgtgtgcttgtacttgtatgtgtgcacacacctgagcatgtcatgactgtgttattctagaaaaggcttatgcaaggttgtttgttcgtcatcctgtattctttcttgtttaaatcatttcctaacatcattacaggaaactcatgtgatacctccttttcctcttaagtggacagacttccattaaatctctatcggggactgtaattgtcactttgcttttcctgagactgtgaatcataatttcttatttgattcaagatagactgataaattcttaggatcgagttttctgtgtgattgttttttacagcttttttctcatatacgtaaatgcttttattttaaaagttagataaatatgccaaatatgttcgctctacttggctaatgggcataagaatatttagttttatataccatgctattatattttaaggaccatgtaactataaaacatacacacagtattctactttaaattttcaatgctgaagtaaactttttctgcacttaccatactccctgaagcaggtcaggacaacattagcagcatgagcaaattaggcaaaccccagagtgactcaagtccacatatcaaaaacgaatgtgaaacaaattagcttgggctgagtggaacacaaaggtttgttgttgttgttggtggtggtggtggtggtgtgttgttttttgtcttttgggttttctggggggagggtacaaaatagaagacaaggttgtacatgcagtttagtcaaaacaaggaagataagttgccaggttttgcaaccatatgtgctgcatgctgtggttagcgggcacttgataaccactgctttgtttcactaactgaccagtttcaacaaatctatttagttctgggtgtattatccatatttctaagggcattttgtggtatcagtcattttccccatttaactctattcatttctcctttattttttacattgtaggaaaatgaaattttctttctcactaggttgatttgtatttttcattgtgattaaagtatttttcagctgagtgtgcattacaaactcccttcttcatcttccccacccctgccctgtgtattgttttacaaagcagccatttatcacaatgtccattgggaatttttgaagttgaatcagacaccagagcacgtgcaagtgcgcccccccacacacacacacgctgatgagcctccttgaggacattctctcaggagactcataacacatgacctaaatctgacagtaattctgcctcctccagacaacttcagacaaggctgttacttagactgcggcacatgtccagcatgcaggctcgaaaagagcatgagctaattactttaaaatctcccccatactgcctttacacacacacacacacacacacacacacacacacacactgcttattagctgtgtttcttctttgtagagaactcaaatctagatgctagttcagccttattgtagtccttctgtatttggagtgagatgcgctgtagaaatgggtctgaaggtcatagaaggcaacggggcttctgcatgacttcctgggcaggggtttcattgttgagacctgtggctttcctcgcagtatgagcatttacattatagtcttctggccacagttcagttgagattctgggtaacagcaacagacatattcgagcatgagagaccttattttgtggttctagttcttaactattgcattgcattgataccaacgggcatcagagggatgctatctgcactctgcctgcacctgagcactgccaggattgtacatttttaggcaaactgaagaaccattgctagtataagccactgtttgggggtgggttgcaagcagtaataaatccctgagatacggtggaagggaatgtacagatgagcttagatcaggatatagggctgttatgataaatctttccgccaaaagccgcctgagccctaccgcttcatgtgagctttatgccagctgcctgcccgagttagggcccaaatgaatacacagaaacttgtattaggttcaaatgctgcttggccaatgactaggattctcatctgttagctcagtcttaattatcataaatctatatattttataagacttatctttatagaggatgcctttcgctggcaccctctcttgccggtggctcacatggcgctgctggaggaagcgaacgggaaagggcgacacttcttgtttctccttgctaaatatgaacctcctcgctatgtcacttccggcctggatcaccacttatctactacatttcccagaatcctctttggctcctagtcctgtctaacttggtgtttcattggccaaacagaactttatttaacaatcaataagataaacatacacagaagtacatttcccatcatagggctgctgtaataaccaatactaatatctcaaaagacatataagagtaaatgctaatttcccacatgtattgcttatccatcgcaggtcagctagagcagccaacatatgtgtcttgatgatctcaaagtaagaaaagaagaaaaaagagtgaaggagggagggggagaggaagagcatgagatataccatagaacacagctcctaaggtttctgcttagagccagcacacataatctaggcacctttggtggataaaccattcacagggccaaggttgacatgaacttagtgacactaaaaacatacagtccatctgcatagggtatagaaaactacatgacaagcatataggtcattgtgtgtgcataactacctcaagggggtaaggaatccttgggatcatgtgagcaaacagagtgaagtcctcatatgagagaaagcagcaaaggagtaaatggcttggatatttggtagtttcagagaaaacacgaatcgccctaaaatccgagtgcctgcctgctttacattactgggcagtatttctgctagagtgaggatgactgcttcccagttgtcatcacctttgctatgttccattccactgtttgtcatactatttatatttgctattcactggcataggaaaggctgggggtgggggtggggtcccagaatgagttcaggttttccctaaaaggcatgaggcattattaaatagttatgagaactgagaaaaataatcagccttatattttagaaatacagatctggtgatgatttagagaatgggttcaagtgagactggatgctgtcaaaacagcagttctgaggatctcatccaaaggttgataatggggcaaagagcagggaaatgcttagaaatgttacattgaccatcctggtgagaaatgaggcccagaagataagatttaaaaaatggaagttaaaacacagaaagaataaagggctaatatgcttctcgttgtgtgttgctatttccagccttttagaaagaccaaccctgctaactaggcacccagggacattggcacatacgcaaacatgagctttttattagtttgtcatcaatgcttctgtcatgagccttggattttcatttcttgcccaacatctgcgtgaagcaaaacatcagaccaaatcgggaaatgatgttaagatttagttaacctgaaatctgcccatgtatctgagaatcctggcaaacagcatgattgatgctatgattggcatgagatgcctgctgtcccatgagatgccaggaggacagagacagctcagcaggtgtctcttattgggttgcctacatgtgggtgacaaggaaagactatgcttcaaagaaagagcagagaggatgtacctgctgaaattcctcctcatagctatttcatacacatttagatatttcaacctagccccttcagtggcatttaaagatacttgatcacaaactttgctgagtagtattctactgacaccaagaaatggtgacccagaattttcaactctaactgcaggtggtcaggtgaaggcccagaacaccaaggacaaataccttgggcacttaggaatgagagcaatgtatttgggacagaaaaactgatgtggacatgggtagagttgaaggagtcagagggatgcataaaatttgtgtgccatacacaatccttctttggctgccattgctctaggtaccacattagggacctgatttaaaatgactccatataccattttatctttggggaggttaagtctcagagatgctatgtacattgatcaaggctacatggctagtaaatgttgaagctagaatttaaattgggatttgcttgaccccttcttagtctattttttgttgttatcacaggatgcctaagactaagcatttcataagaagccatgcaaatgctttgcattcagtagctggaaagtttgaagagcatgataccagtttcttatgagggcccatgctgcctcacaacatggaagactaccaggtggtgcagagcaaaagcaaaggaaagaatgccagagaaaccagatgtgtgttacaacaaccactcacaagttaatcagttcaaccctcagagaacagtattacttcctgccaatgaccaaattatctccttaaggcaccaagtgccaacaccatggcactagggaccaaacctcagtgtgagagttgttgaggaccaaccacattaattaaacaccagctctagaacccaggagttttcttttagtctacactgatctactcgaaaactgttaatgaagctcaactattggttttcatttttatagacacacacacacacacacacacacacacacacacacacacacacacacacacaggagcttccatgcaagtttgcagccctgaccaatatctagaacataagccatgaaagatcatctactcaagtagctccgagcttccaggaccctcattgtttaagacaactcatagtttaaggagaatttcactacacaacaatgggcaactaacattcaggctaggtacagattataaaaagtgatgaacattattcctgttgttaaaggttttacacaaaatgaacatgggaataagtactaactgagagactgatggtgctgggtggttgtttcccttgtgttagatatgacttttttcttggatcagagcagttgtggtccacatatcctaagttctcacaagattgagcctgttaacattcccaagtagagggtggggtgaggctgaagatgtcccttccctcctggagaacagtcattgagaggaggaggctttcagtgttacagcatccaggaagttgcacagggaatttctcggcattgcagctaccttcaaatgggccatacctctcattgttttcccaagtaggctggataaatcttctctttgttctgctaccttttctatctaggttgactagacacagacttcgtaggaaggaaaaagaatttgttcattggctaaatgatgaaaatcttcaaagaaaagatctcgtttgagaaagaaatttcattaatgatgatttcaatttacataccattgctcttgctacctgcttctcccaaaattttgtcacttctgaagatatttatctgcacttaatctagtgtgatggctcagaatgcacttaatactgcccatctccttttccacttccatggtcaagcattacaaattatgaattcaatagcttggttaagaacaatttgtggttataaacaatgctctatttgttgtgaagtcacacattgaatctctctctctctctctctctcaccctcccttcctccctctctgtctaagtacatatatatgcatatttctctaaatatgtatatgcagatagatagatagatagatagatagatagatagatagagatatttccctttctctcagtatgtaattatgcaattcctggcaacttcttggcattgacaacttcctctcagacataagtcacattgagctgcatggagaagataaggaagaatgtagggagggaatctgaaggaagggtaagagcttctatttcatggttttcatcttaacagaactgaaataaaaatcatagtcacaacaagcctgttccctaacttgaattaataaaaataaataaataaataaataaataaaccaaaaccaactaaactaaaaaaaaaatcatagtcacagagcttatgaaaatcaataggggaaaatagagtgttttcctgaaacatttattttgattaaatattgaggctgatataaaaagttaaataaataaatcatttcttttataatgaaatgaacacagaagtaattgtataaatgaaagactgaattcaacatttttttatgaaaaatacagactcacctaccagatctgagagatggacagcatttctgtgctttggatattctagtggcaatgctcaatacataggtgacctttggcttcatcatggctggtcaacatgggcatacagatgaagtgttgcatttcactttcagagttcattgttgttgctcatgacttagaggtaagaatgtcatattaaggaaaagtgatacaaaaatgggtggggaaattgtcacagccatttgaaacccattaaaagtaaaaatgactctatccagttttgatttctttttttttttttagttttttttttaaatctattttttttattgaggatgtgaggatgatctgactgagacagctgttatcccattgctccccagggttgattcggctgatctggctggccagtcaggcgtcccctttctccctcaccattccatgctcatccttcttgaagaggactaccttcccccaataaaggagaccagtctttggtcaagggtatccgagtagctgcggctctcttgctagaacccccaaacaagctctgaaggtccagtttttatttctaattcttcatttcagttttgcggcaaagagaaaacctcattaaacactcaataaactgcagggtttttgtcctaagtttgaagttgagggggagacaacaaccaaacagagctttagtcagtgaacattcttgggtgagaaaagaaaggaaagcaggaatctaggaaatttcttctttacaggagactaaagtagatagttccatggcttgtgtggccagcaccatgtctgtgtagagcgctttcacgatcttctctgtctaagtcttcacccttcaccacatagactgcccttcctctacccagccccagccactcaatggaatgggatctgcccattaacagaaacaaagtactgaaatgctacagttgggtgagtcttgaaaacatttaagtgaaacaaaattgtcacaaaggaccacaaatagcatccatttccagattgctgtctctgcattctcaatactaagggggccatggtgacatatcagaatggttatttagtaatgaaaagattctttttaaatttttgcatgtgttgcaccataaattgaagagtaggaccacgtccacagaacacaagcacagcaagcctcccgactctagcctctgttgattttgacagggccagaagtaagttacggggctatgagatgacaggttgacgccattaccaatgtcatccatttttctgaatctttgttcaaacatgaatagaaaccctagaaaaataaggactcagattacaccctattccctcccacacacatccatgcgcttggcatttgagaagcattgtcagcattgtatttccatcatgtcattttgtaaagttgaggagaactgggagctttgacctctgctgtcacatgatacaactgattgctattatattcctcttctgactgtggagcaaccaaaatctgcatcttcactggaccattttttacttcttagaaaggcttttttgaaagatgccccacataaaaggcttctcagaccacgactattcctaggaaatgctcagcatagttgaacctacagacacagaaatctgagtactgactcctgatggggggctggcgtcaggggagagcaggggaaagctgcttattggacaccagtttttcttcgaagcaataaaagtttttggaactagatggaagtaaaagttgcacaatgttgtgaaataccaaataccactgaattgtatactttaagatggctagttcttatgttatgtgattttcatctagattcaaaacaaaagggatgggaagaagggactttccgaaatctaagttcttaagaaagtcctttcttagtgaaagggtgagtaaggtgtgatgcgtaggtcagtggagtgctaggactgtgagaaaggaatggagaaacccacaggcaggatgtggcatgtacaaaagaggagcagagcagagaggagaaagtgcttcagggggactctctcagctgccaactcagagtcctgctgattcagccagtggtctctgcagacccccgccccaagccacagtgagctcctgcatctcagccaaaaccacttcctacaacctctcttttcggaaaagaacattcatttcctgaggcctgtcctgcaacgctgtcctgtctctccccctggatttaaaaaacaaacaaacaaacaaacaaacataataaggcttcacaatataagtatctggtccctgagatttatttttgcatttgttgttgagaataggatgatgcattggcaaggcctttgttcctcatggagatcagctccagacatctcgatcctgttatctctgttgcctcatcttgtgtcccccttccccacttgtacaatgcagccacactgggatctttgccctttctcacatgtgccttgcttgagctggctctgtgagtttgctcagtccatcttggaccagcctcctgcagatctttgttccatctcagtgaggcctgatcaccctatctagcaacgtaccttgctctttctctctcactgcctttataaaccagaaagtttataatcttttaacatagagtattctatgtaaacatctcacaggttctttatctgtctcctgctgcaagaattctggctccgcattgacagtctttggatattttattggtattttagcctagaacaacacatgactcgaaaaagtaaggactattccataaatggctgcagaaagtccaagaatcctatagctcaaagtaaattcctttttttcttgatcagttttgagtacgtttccaaatgaagccagtttcacagcaacttctaagagctttgctgcagatgctacctctgatgggattcgaacaccgtatccaggttctgaggataacacatccaagttattacacaccaacctcagtcctgaagctggacttgaaatcttcccaactgcatttttttttctgggaagcagagatggaggtggaggaggaggagggattaggaaagttccattgacactagccagcaaaccctggcagtctgtagtcatggtgacacaattccaagtgggtcacagaacatcattgctcaatctcactgtttgagcaggatagaccactccagcctttactagaagacaccaagtcacttgtttatgaataaatgggagtgtatcagggtcgccaggcaaagccaaggaggagtctactgattctgtcaggatcctatatcatgaatataactgtgagtcagctgaccttcatgtgttccacagttccgcaccgggccctgtgatcagattgtcacccagggaacatttctttcctaagtgctttctgttaacagaagagtgtggagacaatatagatgaatacctttggtttgtctaaaaatagtggagaacttgttcaactttcggttgaatagtgaattaatctgtaagttgaaaataagttctttctgtgggtgtgggcatagtgaagcctctcaaattgtgacccaaggccttgcagttgtcataatttcagactaatatgtagtgtatgaatatttccagtgtcaagcctatggaaacatgtctgaacagaggaatatgaatgaattttagagtactgtgcatcaaacctggggactcacacatgtgacttaaatgctctactcctgagctacttcatccatgggagtacacatcttccaaatgacctcagttgatatttatgaacattaagcctaagaaccaatatcatagtacagtacaatttatcacatactcccatatgtatctccttgtgccttaaagttgtatgaatgactgatggaacatgactaattttaaaggtagagaaaccaagcttttcaagatgctaaatctaaagttatatgactaggtcatgaaaagggggtagactttgaaccagaagttgcctttttgtagatacaactcttacttttacgctatcccgttctattcttttgttggtgggttacgtgggagagtcaagctgtgagaaaatttggataaaggttcaaccagggtctgtgtcagcgctggagacgcagtaccatcttgtggccacatggaaccacagcattgttttctacaacttggtccatttatttatttatttatttatttatttatttatttttcgagataaggtttctctgtaggtttggaatctgtcctggaactcactctgcctcctgattgctgggattaaaggagtgcatccttaggtgatagatctgtttggagccagcttcacccttcactgttgacattttattgtcagatcctagggcctttgcttttatagctgagacatttttatcctagattacattaatttactcatccagaataaggaccatatggtcactagaatcatgtgagacataaatgtaactaacgtgttcctaacctagatcctcgattattaaaattgcttcttgattagggttcttcttattcttcactttttttgtttgttgaagagtaggaccattttgcccacttgtgtgattctggatttgtggctcatgtagatgctcctacccagtaattggaagcccagtaattggaggtatcttccaacaaaactccaagtatcagagacctatgtcctctcactaaaaagtaatactctttcccttcaacgtcatcacagtagaaacaaatttagagattgaccacaattttactgatggtgagagtctctgggactctgggatagagatctcaactttccaactacacattaaacctgtaacaataacactggatatgctgtttttaaatcggcatgtctccttggttacaaaacatcttcccttcttctaacttatgtgtgtgtgtgtgtgtgtgtgtgtgtgtgtgtgtgtgtgtgtgtgtgtgtgtgaaacatttcactctctgagccacctttgccctatcccaacttctactttgaagtacagagttgtctgactctgatgaagaaaaaaaaaaaaaaaaacaaatcttctgtccccaagcctataagtgagtgtagatctccacagtgtttcaggtgactccactgtctccttcagtgtgttgctatctttggcttcttctactggagggtgtctggaaggaatttgccacccacaaaactaccacacagggtcagtgctttgtataatgcaacaaaacagctctttaaaatttctttattgtcttctttcttcccaggacctagttactaatccaagcactgacctgccaagcactttaactgaacatctatgccaaccaaaattttaagctaacagatgtggcacatggccaactacatctttctatgtctgtgatctgtcctcaggcagaccactggagacacaagaacaaaccaggggtactaaggagttaaagccttagcaggatcccttggttaccaaaggattagagtttgtgccaaaagacagcatctggtgcccttttatgtgagatctggtgccctcttctggcctgaaggcatacatgcaggcagaacactgtatacacaataaagaaaaaaaaaacctttggaaagtacttccaggaaaccatagaatccttaaagaagcaatggtagaataatatcgtgatgattaattttgactgcaaccttggctggatttaaaatcacttaagagacacacctctggataggtctgtgaggtttttcatgacaggtttaagtgaagggggaagatcccatgggccagggtcctagagtaaatgaaatgaaatagagaaggctagagaaagaacaccaacactcctctgtctccacttcttgacatcagtcacaatctcatcagctgtctcagtccctcagccacgcccttcttgccataatggactgtacactcaaacctcaagccaagtttgctcactctggttgcttcttactggatatttgtttacaacaagaaaaataactaacagagaaaatcccccacatgatgttaaaatgtcaatgaaaagtaagcagaaacagattgtaaggtaagcatttaaatactcacaaatattaagaacattaaatgaaacaataaaaataaatggtttattttagtaaaataatgaaatatctccctaaatgtaatctgtgtatatataaccacattttccaaaaaaattaagagggtagagagaagcccaagaaacttcactaggtagtaagttatgtgctttggaaggaaagaatggagggaagcatacaggagcatgttcaaagagaaaacagttgagttttcagaacagaaacagaaaaaaccaaaacaaaaggaagaagaagttaattctgattgtttataaaagacacaagagaggaccagagcattttctgtgagaaggtgtcttctatgaatgtcagcacttacagccatgcaacctcactggcatgactgcctaaagatgatctgaacaagactgacatcagtggacatgctattgtgttttagcggtaagcttacaaagtctcaactctacacaaaggactgcagacaactacagaatgccaagagcaggagaaacagtcttccccagagaagagcacatagctggttatccaatatcagatggtcagccctgaaaattaacatactagcagtgttaatagtgactgagaaggagatatatatatattaatttgagaaagaggccacaggcttaaaagagggggtaaatggaagagtttggagagagggaagggaaggaagaaagatataattatgtcataatctcaaaaaataaaataaataatcttttaaaagatgtactacttagcaaatgagttaaaagtaagtccactgtaattccaacaaaggaggcaggaggattgccacaaatttcagactggcctagaccacagagagagacgtccaaaaacaaggaggatggggggggaagcaggaaaagaagcaggatgactaggaggagggaggaggaagagataaatatatccacattgaaacttctaagtgaaattgcagaacaccaaggaagtgtagtagaggaagcttcaaaatctaccacaggaaaagaaagtgttacctagaaaagaatagttagactagcagtgggcatgtcgtcagcaacaaacatgaaacagtatttatgaacaggttttaaagtactgggaagactacaaatacctggcattgtgtagcttttctctttgtttgtttgtttgtttgtttttcttgaaaataggagttgataccagggccttaggaatgctcaaagtggtctactgaggagctacatcccagcccctgctataaaattctgatctggataaatttacattcagaagagatcgatgaaaacaactgtaaataatgctgcattgtgtgcctcatccagatcactgaacagaaattggcaattcagtactcacagtgcctagccaaactaaacactagtgaatactgtggacttactaaagatgtttaagtatgcaacacccatggaggctctgaacttttttcgattatagccttttttctgatgcccataaatgacatttgggtggctcaggatgtctaccacaacaagatgtggatcactaaagaaatgtaactttggaccaagaagccacttgaagtccagaacacagcaatgattattgatgtgggagcattcattcattcctggagtctctgggtgacgccagaggggaaagagtcgcatcctcaagaacaaaaccttttcaaagggactaaaagttcttggttcaagttcaacctcatcaacataggcacagtatgttctcacagctaatttcaccttgaagagtgggagtttcactgcagacccaacaactgtactgggcttgcccttctgctgtttccaactagaaagctgggtaggagagcccagacccatcatctgtcggtggagaaatggaggcagatcccaatgccactcaatatttcttcctaagggctctttgagaccacagcaatcaggtttcccaagaaaagcagtcatctgccaagctaaagagcagagctggagttcaggaggctgtcacgttggcctggatagaatggatcctagagggaagcaggctacacagatgaacaggttgtgattgactttcctcaagacagtgaggctccaagagtcaggcaaagaaaaattttaggtgaaagaacagctacagatggatgtaagcaaaacatttccccaaagcaactaactcatggatgggagatgctggacttccaacccactacagaaaagctgtctaggatcacatacccagaaaatccagacttaaactagtagagctaactggtcatagagttacagttattctaggactctataacagagagaaagatgaaaagtatcttctggggtagccactgtcctcatgtggacactggatatatgaactgtgtgggtaaccaaaaaggagatatgcttacaggtgtaattaaaatacaagccatagtttaagactttatgggggaatgtaagctgtcttatcaacaatgctttgttagtagtatttttgtttgtttgtttatttttttagggagagttgctttgtttaattgtgttgctggggactgaatccacggccttactgtgcaaagctgctcttccagttctagttaatagttttaatactgactgcctgctaaaatgcatattcttggaaatattgggttaaataaatgtattactgtaattaaaaaaatttaaagacatgaaagaaaatttcgtgataggaaaagaggattgctttgtgccactgacttcaggggcaggggagggtacctcccacatgtaggagatcctcaaagcctctttagttgtttgatagggtaatatatgagccatagtcacacttcccctaaatactactatgcttactttctgtgactgttaagtagcttcagctaaatttgatttgagcatgaaagctattgttgtatgaatttctgtgttcagatgatagtctcaaaaatagaaataaaaccaaggtaacaaatagatttttaagggcttcttggagagaaagagagagagaaagaaagaggagagccaatgggctagtggttacaagtagctagagtatttcctccttgaagctcactttaaaaacaaaacaaaacaaaacaaaacaaaaacccccaccaattaacatttgtattttctacccatatatcggtgctcctgtttgacaaatgtctgtgttctatttgggaatattcttgacagtaacaaccatggaacaaaccgtttaactgttaaaaggctttacaaaaggaatttcctcctcagaagtcaaagcaagttttgacgattcactgaacaggtaacacttaagtggtcacttgggtgaaggaaaataaaacaatgagcaagagagctagaaatgccaaaattgtactttaatttaaaaaatcatttcctctattatacatttccatacatagagggaaagaatcccccatcagtggaagatcttgaggtaactgctagtatttgtttcccttttcacagtatatgaatataaacacaaacactgcagattccaattcacatttaatacaacatggcagtagatggaagaaacggtttcagaaccagaagagaagaacagaagcaattcctggaatcttctggccattttacctttgctgggaatcagctgtcatttgcagggaaagagaacataccaagagttgctaaaggcaaccaagtgggctttcattttgtccccactattgatggtaggcgtgagtccataacatgccctacagctaccctctagaaaagcaatgtagtcctccttccgaaacaggttagaattaccaaggcagtcctggtttaggaatgtttccaagtttaggagtgtgtaaggctgtatcagattgaacaacaaggaaaaaacagagaggcagtgtggctggagtgattcactcctattcaaaaacacttttgacacctgagaaacaagccaattattttgcaagaataaaatggtatatataaatagagtatattcaagcattcgcatttattctacattatccacacaaatttaaatctgaaatactacaacacaaaacaccaatggtctgtgcaaaaaaaaaaaaagtatatttgagacagaaccttatttaattctccatttaaatacatgtgcaaactttgcatatgttctgaggagtgctagccaagtctttttctatctatgttgccattttgcatctctaggattatcttagagttggggttagggaaaacaggctttacagaatgtgcaagactttatagccaaagtcatgccttctgtgaccatggaatggtgtgggctagcacacactaactatactcttggctagagcatgatatgaagtttatacgcgtctctgtaaacttctatctgggtacgtaaatcactactgcagttacttttgcgcctgtccgtcctccacacacatattaacattactcaaaatagaatcatgaaatcttccgattttataaatatattgtctctgtaaatctaaggaaacagaaaatatactcaataaaaagccaaataacatttatagacctccattatttaaaatgttcttccttgccttgtatttttttgttgttattgttatttctgagacaaggtcttacactatgacccaggctattccagagctcactatgttgtactgtctggctttgaactcacggcaatgctgctgactcagacctcagccacagtattggtttaaaagatctctctctctctctctctctctctctctctctctctctctctctctctctctctgtctagcttgaactgaggtagttttcactttcattttcatttctgttgtctgaagttgagtttttaatgtctttcatgactatgtcctgaattctttctgcaagagcgcaacagttgatttttttgaggcttttaattaaagtgtgatatgcgtccttcttcccatgagattgataccaccactgaagcatctggattttctgctcagctgtgttttggaaatagtcattcttgatctcatctatctttgtttcagagatcccattcttccgaacaaattttttaactttgtctaattccatgagttcagcaatagccaggatgtatttactcaagtcaacatctgaaaaacagaaaatagtgtctgaaaatgtcattctatcattccattactgaagccatgtttacttctccccttaaaatttggagaatgggtgggtcctatagatgcagacagaataagcatctgttgtcctctcaagcctgctgtggctcctatagtttattctctgagctggccgtgacactagatatctttatgtcttcatatctcattcgtgacatcagaagcttaaaaaaagattgtgcctaatgccccctagagacctgatgaccagacccacaacctaaaaggacagttcttcctgtctccaagtcacaggtcaaaggacagaaccaaacagaattggacatgttgcagaggtgagaaaattctgaggctatggttccacttgacttgaacatcagtttataagaagttttgtgatacaactaactggttgtgaagaaaatttttcttaaacctctcataataaatggtcttatcactgcctggtttatttttaattaagactattataaatttaaactattgatagaactgacagtttaagtgacagcctaaaatgtcactgaaatttgaacattatttcactcaaaaatgttagtctgttctgatttaggcttgttctgacaaagaaagacacttctgtgaaataagataatagaaagacttacctgaggaaatcattggcatgttttcctgggaagaataaaacagaggtagagtgacaaatacatacttaaatgtcatttaattctttctaaattcagaagcaaatgttatacaattgtctgctagatatacataattagaaaattggactttgtgattaagatgatttctttcactcattcaattttgactctaaaggtttcatattcctgtgttaaatactgtctagcattagttccacagctagctagagagagccatactgtgactgttaggtggactttaagagcaaagtcttggctggggtttggaatctgagtatcgtattttggttaatggcatttctgcaaggaaaatagcaaggtgaaacatggcgctttacacatctcttttccagctcacactggaaggcttccaagctcctttattgctccttatagtatttgtgtaaagccttgtaaggatttattttattctagaaaaataccccttgtaagcctaccttcagaagtccaacttttttagcccaatttagtaataagctttgaaactatttaaaactatctattcagtctgtttcgttactgtttaaatttgactcacccttgagaaaataatacaaccaatccaaggccttggactccccctataatcaagttttttataagttaactttaatgcataactttaatcttaaactatactctctatagtcatgtcccttgaccagataaataatgtatgtgtgcatgagtgctgtgacgattcggtctgacatcattccctggaaacagccagtagactgacagcaaccttgaccactatccactgtaaatgctgaaggcaacatataaatacaggttgacaaaatctgcttctggttttgagtgctcttctgggtcagtaaggggtccaaaatcaacttcttcctttggaaaactctggtaaaagagtctttaacaccaagttccatgctcctttccaataccatgcttcattgtgctgcccaacagagagtatgtagatcactacaggctccatctccactcaaatggctatagaggtagatgcttttaggtagcaccccccaaaaaaaacttactaataaattagcagctgccctgttaactcattattaatgttgctctaacctgtgcatgaacaaacacattttttatttaattttattttatggttttaattgagttatacattttttctaaagaatgtactaattttgtttcttcctttcttctgttttttttttcaagaaagctgatgtgactttatgtacccacatacttgtttcaaagaatgtactaattttctttctttctttcattttttttcaagaaagactttgtatactcacagaatttgagatcccagattcagggtcattgggacgtcttttccaatactttttatatataagcactgaaagaccaaagataaacactgaaagaccaaagggattgctgtcagactcacattccgttctgataggaaatcctcacactaagaaaagtgaactaagggacagttacttgttccaacaaagaaggaaaaatgagaagattctgagtcactggtacttggtggatcttatcattgccaggcctcaaggtgattttccagagtaactatgatgatacacagctttcccttaactactggcaaacacatcataagttttaagtaaaaacacaaaataatagggtaattaaaaataaataaacataaaaattaaatatacattaaaataaatggtttattgagggagggcaggcccagagaagttcatgttcaccaggtatcattgtcacgctctgcctggctttctgtgacttctcattgggcatagtggctacttctcatgtcatttgaatgtacacttcaaagaaatagaggacttaccaaatactattacccaaacagggatgatgaacaaccataggaaatggtgtctggaacctgaagtggagaatattgaacattttatatgcaattaagcagcttttaagataaagtaaagctctgctctctcaatcaataacaagccaacaagcttttattctgacatgaggacggggatggggaagggatgtagtcatagaaacaaatgattactttcttgcttgcatttggtattgctggttcgtgtgcactcctcaagggttccatgttcacacctagagggaaaacgcagaagaaacttagatgacctgcatagattccttcggtctttcattgtacattacagattacggttctttttatttgccctttcatctctggcacttgtttcccccctgacatttctagatcaccatcaaaagctgttacaagctaagaactgtgattgggtgttcgtgtgaacaatgttacatctcctttaagatattggagttagagacatggctgtgtggttaagagtcttgctgcctacgaaggggatcagagttcagttcccagaacccacacggagcagctcagggccacatctaactccagctctagcattttctggcctccacaccattgcagtcacgtgcttatccctgtgccatgtatctaaaaaataaaactaaagatctgagtgacatcaagatttttaaaaggtaataaaatactgatatacaaaagaaagggatagacaaaactaaacataaagttggtaataaattgagttcttaagatacaagagcttttttttaaaaaaagctattttaaaaaataacttatcaagggcaatttaaaaaaaacaagtctcataaatcaataaaacggcatgaaaggagccactacctaggatgctgcccagggccctagtgaccaggacagtcaagaggcacttgtggggttttctttggagagggaaactctgacagtccaagttcacagcccacctcttcctgcagcctatgcaggtgtgctgagagatcaggtaacctcctggagcctgtgagttcaccggcagcatggagacaattacactataactcagagtgccagtgagaagaaaactgaattgtaattgtaaagtatacagagctattgccgggttattacttgggaccaagttaattaacttccctgccacccccaccttgtacctcatcactctcagacacttggagctagagagaagagcaaagataacaacacaaatgatttttctaataaataagataggaagcatcgggtctctgacatgcatttgcagcttcaaaaaactctgttgaaactctgtttaaaaaagtaaactatctgaggctgggtcatggatgctcagtcccagggagataattgttttcactaaatgaggctgattatttaataggaaaatgttgatagcacaaggaattttagcaaaataatcatcttttcagacgttaataatagaatgttaatatttcaaaggagaaagctctgacatatgtacactttatgttcaatatgagttatggactgagataaatcatctttactgagaatatgattcattcataagaaattcctaatcaccagagcatcagttaagaaacatctaagtaattcataatttgaggaaaagacagagctaacccttgatttctcttaatgtggtgtctctgtctgaatcattcatagactgtgtttttcagatcactatgattataacagttacatatcaaaattatcagaaaacctaagaatacactgaatcaaatcaagacatacataaaaattatctaaagaaatttctgcttgatcctaattgaaatctgacattttaaaaaagaaacacttcttagcttgaaaataagtgagcttataaaaattgccatgtaaaactaatatctaaatgtaaaagtatatgtaagcttgatttctctgcaccaaggtggtcccacttaactcatacagtgggtgggttaatgtaatgtatgcatatgtgaatttttacatgtgtacatatacacgtatctatgcgtatgtatatgtgtatgcttgtgtatattaatgtgtatatgtaaacattcaaggacaataaagaagagctgtattttctttccttaaccctaatgtaatttgaatacatatatatatatatatatatatatatatatatatatatatatatgcccataggttccaaaggcaagttatagacctatggaatggcacggaaatagcagttctaagcattttatagaaaaccaacatcttgtaaaccagtagctacttttcattcagtgctggaaattgaacccaagaccttgcacttgctgggcaagtgctctaccactaaagtgtatcctgagatgcaaaagctgtgcctgcaactcgtagtagctagtgtaatcaccagagaaatgtggcaggtgggtagagctaattaaatatactgaagttcagatgggttaagtgatctgctcaaactagccaaattcatcagcagccaggtgagcagtgcatccaggttttctagctttgagtcaaaagcaagctctttagtatcatgacaaagacttcatgataattccttttcaggcttttttaccctccagcagatatgagagttacctatgactctttagagctgttgttccctgcctgaacacacttccacctacacgtaatgctgtttcttgcctccttaaggctcccaccttccacacagagtcaaaaggtcttgtgcataacttgcaccactccaagcacaaatgttctatgcttgccatactctataaaatgttgacatgcaataagcattggcttttttgccttctttgctctgagcaccaaaaccttgataacagtcacacatctcctttcactaacctaagcagccagcagggtcacttgaacagttttggtaatgtttgggggctggaaagtgctcagtgatgtccagtgctgattgatggtaactgagcaaatgggaaacaagaacagaactcagttcctaactcccactcagtgtggctcttctctaggaaggtacgatctcctaagttatagctagtattttaggcacttaatatggaaacttacacagtgcaaggatcacagtgttcgcagacagaagcgttgcaatagaagttgtgtttgcacctgcacttggtattctgggtcaaggtgcagtttgtttccacttctaaacctagaaagccagttcataaattattctttgtagcagctagttaaaaataagctatgaaaataatggccacatctactgcttattatcaactgttacaccatcacacctttaataacagtgtttactaacaaaaacggcagtattgggttgaaagaaccaacaatcaagtagagttgttagtgggtagatagaccagagagtcagactctccccaacagtgcttagatggtccctccaatcctttaattgagagccttgagccttaaatacatggcctggaaaaccaccaccatcaccaccaccaccatcatgtctagcatgttggaatgctgcaagataagcctaaactaggcttaaacagacatgtgctcaggctccacttggaaattctgatttatttgggagctgagacctaagcattagtatttcaatagcttcttaagcaactctaatgtataaacagggtttggcatcacttctttacagtctggtgtaaaagctttatgagagagagagagagagagagagagagagagagagagagagagagagagagctttaaaacatgatgcccagggtttccttgatatcaagccaaaatatggctgttgctgtcattttggtttgttttcttcttagatttgagaataaattgatatagctacaaaattttaggtccccaagtaaaatgatgttgacagacagaccagatccccaaagctgaggggatgtcctcccaacaccttgggtttctttgtatggccatagagaagagccataagtttaaatagacgtggggacattggcttctgtgggtggctttatttgcggctggtgtgtctccactcacagggttattgagtcctttgtctccatttgggagacttgctgagaagacctttaaaagtgattactcccttagctccatattccccagctagcctcattctgctccttcctgtatgccagcatggtaccagaggaggtcccaatctcagagggtgtcatagatgatagcaagatcagcctctttcaattgctttctgagatacataccgtgcccttcatcacacagtgcacatcttctgcatttatcagaatagtgttccttgtccatgtattccttcccttccgtgcagggaaggcagcttggtttaccaccactgactgtacagtccaaatgttttcgttcacctatcatgggataaaaggatatcaaatttttgaagcctgggcagtcgccatgtaacagcatgggcagtatggaaagatgataataacaaatcttaagaatcagggaacgacttgttaggctaattctatgtaaatgcatgggaaagacaaatagctactggagggggtgctgaggaatcacattaagagcctttcaatagcaaaaggcaaaaaacattcccataaaaagtagatgagcaacagaaacacatggggaaagagtcaatcagagtgaccaagtgtacctctttaaagagaagaaactgggtagatggtagaggtggctgcctttggcctcagagattaccaaacgaaattgttgtgattctcattttattttcccaagtccacaaatcccgggaaaaagaacattgggagtgtctagaaattgccatcaaatctttgacagagtgcttactgtctgtaagcctaacttttgtcctatgaatgatgaagacttctctgtcattaccatctgaaccatgcacgtgccaccaagtagatagtcacagttccttctcccccgtttctgtttattttctacccaggaaagcagtacgttttgcagacaaacacaaacatatttctaataagataccataggatttgttattattgtaaacaatttcaaataatattcatctttgctttgatttattaaagtaagtcttcctatttcagtgactaagaattatggaacaatgccttctggaaagataacatatttaacaagtgtttattaagtgcctattgtgtgctaagggatctctaggagctgaaggaagtcctgcaggaagtaagacaaaacattagtttccggggccttcaccttctcaggcagagatgccaagcggcagcaagtagtagtgggtagtgaataaagaggaaacttctgcaaaatatgcagggaagcacagcagagatgcagtgctagcaactctagtcactaatggtgtaaatgatgacaacagacaaacgcagtcaactctgttcaacgagcacagagcagcaagggtcatctatgctgtgtttcctactccttgacttggtgaatttcctcatagaacgcttgttgtggaaacaacatttactatgtaacgtgagtcactaaatgaaaatataaatgacatcctgtgatcttttagtaaacaccaacaagtctgttttaaaaggtgaaccatgaaaatctagagctaaagtcaaatggcacatcagagctacacaagcctttatagcagtattctactggggacagaggagaggaggcattgtgttccatgcaggtggtatgacactgctgtctaagtgaactgaaatatctaataagctaacttatagatgctgtctagcatttttttgatttttaaaatataattgtttattttatatactgaccacagtttctactacctcctctcccccatttcctcccacacctgccctttgtatttatttaggttgggcaaggcaacacagtttgtggaataggttcccaagagccagccaaagtgttaaggacaacacctgaaaccattgtttgctttatatgaatacaatttgatgggggatgtcattctgtatgctgtgaatatatgtttctcttattggttaatgaataaatgttgattggccagtatttcagccaggcagaaagtataagcagggctactagactaggagaattctgggagaggacacagagagtgagttgccagagagatgtcccatagccaccaaaggagtaacatgcaggaacattactggtaagccatagcctcgtggcaataaatagtacaatagaaatgggttaataactaagagagagctagccagtaagaagtctgagcattggccaaacagtttataattaatataagtctctgtgtgtttatttggaactgaagggcagtggaaccaggcagacagaaactccatcttcaacaattaagattgggggagggggtggtaggggaagaggagagggagagggtactgggattgacatgtaaaacaatcttgtttctaattcaaatttaaaaaaaagaggaataaagaaaagggaatttgccctcctctttctcaatatggttaaaaaaataaaataaaatttatcattttaatcctaaaaaaagattatttcccctaaagtacacaatctaaatttcctaaactacaaaaaagttaccaaaaaagaacaacaaaaaaacaggatttcaaaacatgtaattttctgatagccacacacttgcttattgcagaaattttggaagaaatgggaaattattaaaaacacctacataccaactaccttgagatatgaattttcttattttgttgcattcttatgcatgcaaatacactatgtctacacatatatgtatatatagtagtatagaggcagtggatatgtgtatatatgtaaatataataaataagaaatacacttttggatttctcctattggatatcaagatgtgatgaaaacttctcaagtatttgatttttattttttaaatttctgtaaatgtacacagtgtattataatcaaccaaaaatatcaattcacatgtgtgatcactgaaaaatatattttatttctattttaaagagactataaaagtatgctaatcatttgacatagagagaagttgtagactttttcacttaagtcatatccacaatgcatcgcctgtggtttctgttcatcttccctccacccccttctcccactccccttccttttgatgaaaaagaaagctttatcacaccaacagtttgtatgtctccaaaatattcagcctagtttccttaaaaataaaacaccattttccaatatctgatattcactgatttatatcatcattactatatcttactatcagatcaccaacactgtaaatggatttgaacctaacttgaatgttggtaagcctaaaattcaaccagagagaataatagtgatgcaagtgttctatgtgtgttggataccacgggggatatattagtgaaggggcagacagagaaaaacctttagtacaaccagaatgccagttatcaactgctaaaaaaaaatcagtacaactgaggattagattaagcatatatcagaaatgtggttgcacttagactttgattgatagaaactatcccaggctttgattactgcagaatttacatgcacaatcctacattgttggttatcaaaatgaaatgccacacacacaaaactttcaagttttaatgcattctgctataaataacccatcattgtgtcactgggcaatgacattgtccagttttctacacatggcccattttccttcttaaagtttgtagcagacatgagatttctctaagacaaaagcacagtaaacgcacacagcagaattctttgaaagctacaaaacacatcatctttgttttagcttgcactttaaattttaaacataaaactccaaattttcaaactataaatatagacatcaaattcacaggctaaccagggcagtgatggcacacacctttgatcccagcacttgggaggcagaggcaggtggatctctgtgagttcaaggccagcttggtctacagagagagttctaggacaggtttcaaagaaaccctgactcaaaaaaaaaaaaaaattcataggataaattgattgtcttcagcaacttaagaaaaaaaaaacccaataagtgattcccaattgcagtttggaaaacagtaactgtgtaggaacttaggtatgaggaggttgtatcataggagaaacttccttgctaggcttagtaaaccctggacaggagggtgcccgaaggtctttgtaggagcatgacttgggcctgatttgtacttctggtactgcaagcctgagaggccaacgatgaaacctacagaagccttttggaggtctatgactattgcctgaaacctgtcaaacaaacctaaataccactgggtcacctttttatcttctaaatgcactggagacagatctgtgtttgtaagtgactgtggacaaccccaaagtggaaactaagtttacaaaattacattttccttagcctctcatttgctggtgcttgaaagagttccagcatgaaagtgatttgcatttcaaaacactgatttttgaaaaactgttggttgctgttcattgcttttctagctcatctggttattcagctgcaaaatgcaaatgtattttgcaggcttctgtgccagggcagagagagagccttagcgataggctgaggagaggggttgagatataccactgagagtggaaggtcttggctgaaggagccacagaagtagtcagaaaacactctggtcagctttgagatgacaggtttttaaccctcacaaatgggttttccttagttcatgagaaacagctaaatagatgattcttttcattttagacatgtatgacagttgtaaactctgtttcttcataagcaccccagagaaacataataaagatgaaaaaaaaaaaaaacggtttgtgtttggaagataattttatagttccgcctcccctgtgtgactctatctactaataggacagcccaatagctgtatacctaactgttcaacacattcttacccctagggcatctcaatccctccccctgattctcccactcatctctggatgctccgtgtgacctaccaggctggcatggttgacagcaaaatttacccccaagatataatccttttgggcagctagtctcagtctcccgaacattccttcccaacttggtcttctcggtgatgctttcagcctcttgggtaccaacacttaactgtgatcccgaaaacacctgtggaagaaaaacatacttagtgatttctgaatcaagccatgtgggaaatatgcggcacccacccgaagtgactggatctgtgtacaggctaagcaaggtcatgctgatgatagccagaggagcggcactctgtggccctgcaggtccaaccacagttttttctagcctacactagaaacacagagaagcccttctccatttactgtcccatgcctggggatgggggaggagggcgggaaatcccatatggtctatcagtctcgggctcttcatctcaacagtggaaacagcccctacctcacaggtctgttgtgataattaaatggaaccaagcatgcctttaaagctcttagcacaatgcctagtccttaataaaaaagttccctgaaagtggcagtattactattgtttctgttaacatgaagttccactaacaaaatacagggaaaactcaaagcaaatctagtttgaaatctagtttcggccaccaatggtgattaacttttctgtgccttaatttcctcatgtgttaatgagattagtattttgtctttaaatattaatcatgaagtaagagtgatcatttctatcagacttactcagagcgtaactatgatttcttcttgctacccagtaccagaatcaaagctctgatcaacacttcactgttgtccaagtatacaataatctttccactaaatccatacaggtctcttcaccttgttcaggaaatatctatacatgaatatatatttctttatggagaatgaatctttaaatctaattttaattattttctcctgaagacataaatccacaattccaagtgaagttatttccaatttttctttgctagctatagagttggagttccttgggaaaataagtaaaaatgtgtatttaagcaacttagaggtaacacctgcatgattcctttcttggaatttctaagtacattttaacctactgagggattgaacccacaacctcaagaatgtcaagccagttatctaaacaaccacctggaggagggagggacgattcctatctatcatgttggttgctgtaaagagtaaagttagtgttgagtcaaacttgcttttgttacctgtcagttctggttttttttttttttttttttttttttttcagtagaaacaagaaaatgacacagattgaaactcaaaaagagggcatttacagggttggggctagcccaaactgacaaatctaaagcaatcaagcttcatgcccaagtgttcataaatgtgtgtgtgtacatgtgtgtgtgtgtgtgccctgtggatgtacagcctgtccttggtatgaaaattttaaccaacatctaagagaaactacatgtgcagtccttgattcctaccataaatggttaagcagccaaagcagaaggacagaaatcaatacatttacagatttgctgctagtagtacctttccagaaaaggacatatatgttatgccatttggagctttctcaaagaaatgtacccctctcctacttcaccctagctacttgcgattctgaggcctcaaattcaaggtctactggactactaagtgaagtcaatgccagcttggcaacttaaggagaccctctcaaaatataaaggttgcctttgttgttgtttataaaggaggcccgggcaagtagcccaaaggtagcaaacttgcctagtatgcctgagtactttaagtgtactcgagacagggaatcattatccaaaacccattcagaatctgagaatgtgaaatccacaatcaagatgagtagagtcacaagactctagcgctatcccggcagcaacctcctttctgacatagtcacatgtactccacagagttgatttcttcaggaaaaggtccttgcttactaccacatcaacgaattatgtcaggtgccaaaagaaatatgctctgaagtgcatgtcctgactatttgcagaggtaaggcaagccgcactgcacacagtttgcattttaaaaagtttgcatgtactcatctttgtagagtgcaatggtctaactgaaactatttaggcagagactggggcatttcaattatgatgggcaggaagcccacacaaatccaaatgttctgagcactttttgttttgttttgttttctgagaagcagaaaaaaaaaagcataaagggagttaaggatcagaaaagtaggtaaactatggcaaatgacaagaggggaaagagggaaatacaagttatctaaatacccaccttgctaagaaagacattttaaagcaagagaaaccttggtattacagtctgctggaagaagtataggtaagcaaatgcactgctgagtacctactgtgggtcacacattgtctggtagatgcttgatgacaagccaatggaaagatagattcttcctactattgtttatatataagggagtgcatttgacacccaggaaatagaaaattatcaccagggaagtgtatgtgtgtggtgtgtgtgtgtgtgtgtgtgtgtgtgagagagaagagagagagagagagagagagagagagagagagagagagagagagagagagagagaggagagagagagagagagagaaagagagagagagagagagagagagagagagagagattgatttcgggagacggatatttaaagaatgggctgtgtcagccctcagatcagatggtataagtcaccaaccagaaaaactgcatctcgagtcctaaggcagtctggggacagaaacctttcttactgagaagatgagcaggctgccgtttgtttagtaaagcattcaacagactggatgaggtccacctctaatactgaggattagctgctttgttcacagcacatcaatctgaatattcatctcaggacacatgcagagtgcctgaccaaaactctgggtgcaagctgacataagatattaaccagggaagaaatgctgaataaagaaagaaatgtaataggtctgtcagggagaaatcataccatacacaaaagtaaaggaagctgggaggcataaggaatttaaggcctggaggcatattcattaagaaatagtggtctctgctaggggaaaccctactagtaagattccgataaaagcaaatagcaatcaaatgactcgtaatgatgtgttgcgatacccattggtcagtgtctccctcaaccctcattagagaagcttcttcttgcaatagatgggaattaacacagacacacaactggacaatgtgcagagtgagagacttcagaacactcagtcctaattaggatgtcttcatcaaaccctgtccctcaaggctcagggacctatacggaagaggaggctgaaagattgtaggagtcagaggggtggatgacttcaaggaatcggtgagttcatgagctcacagagaccaaggtagcacacacaggttcaagacagatggggtctcagcactgagagggagaagtggacactggctcccacccttaaccaagaagctgcttgcaattgataccactagcaaagggaaaatctcttttctaagatagagtgtcattgactataataaccacattccagggcaggtcctatgctctggagtagttcaccagcacagaatgaactctaagcattttggggttttatgtttgtttgttttttgtttgattgttttgggtttttttggggggggtggcctcctttttaatttgggcattttttgtcttgttagttcttttgcttatttgctttgattttcttttttgtgtttctatgggaggttccttttgtttgttttgagagagaaattgtagagttggatgtgcaggcaggtgggcaaatctgatcgaggaaaatatgatgaaaatatgtcatatgaaagagaaaattttactaaaaaagaaaaagaacgttgcggagaagttacagacctgttgatgtataagggacagccatatttgggactggcttatccagggctcctgaggtgatatagggaagaatcccattggtgctcacagccatagggggaccctatatctttaatgctgcattcacaaacaagctgggatgtcaacttagaaagacatcatggtatctactcagcttcagatcttaaaaatggatctccttctgactagagctggctcagcagtcagatacataaacttactcgaagaggaccatagtttgggtcccagcacctacatcagggagctcacaggccctttaaacttcagtcccaggaagtctgttgctctcttctggcctccatgggccacctcagcactcatgaccccatgtcccctcacatacacacaattcaaagtaaaataaatcttcttaaagtagtgactgcttgaatatttcattacctacagattttcatatttcccccacatcagaaatgtgtttttctctccacctttctgaatcccttgtgaccatgggatgtgagagcacccacccttatttccattccgccatggcacttggctggccctttacaacggtcattagcatatgctacctcttcagttacagtaaaatattcaccaagactcattgctgtagctatagttgaagatgaacacggcttgaaatgacgttgccaaagcccatgtttaggagtggttgacaaaggactccaactcagcacttctgtccaaatttgggctgggctcagacacttgtttataaggatttccttaattgcttttgctttatttaggcacaagaattgttttcagacaatgctgaacagaaatcagcaagttagttttatgaggagccttcaaaacacatgctaggaggaaggaagggctttgaaagggtttctgctcagacccaaaagtcaacctcaagcatctagcctggggcaggagaaggggtcatgtaggaggaccatttaagccatggctggggttcagggaaggtgaagcttgccagtccctctcagtctgtcagtcttccctccaggtggggcagcatttgtacgaacagccatggctatgatgtagtgtctggcagaggtatggatctggaacatagacgcctggatcttcacatttgtccccttgggatcccagaagaaagaattttgagcacctgtccctgctaccagatcatgagaaacagaacagttggcgttttcttggcctgcagcatcagaaattactggttttcagaggcactcaagttcccaaacagaagacatggtacaggaatgagtgcacccggtgcctgccccatgtcacacacgctggggcaggctcaccacaccttcctaggaaaggtcagcacttaacaagtaacagggcaatgacaagcagagtgacaccccagtgactgaaataaactacctacttaaagaacttgggtctcccggaaaagctggttcccaaaccaagtgtgaagactcatcttgggggctgaagtagattttaaaaagacagaaagaagaaagaaagaaaaaccactttttttctgttctcaggctcaaaataaacaggaaaaggctgtttttaaagtggaagggggaaaaaaaaaaggtgttaggtgatgaaaatgtcagccctccaatggcaagaatgacttgatcagcacgactgttcagtactgacacagaggccgccatcagactgaatagagtttgtagtaacacagggaagcctcagctccatgggaggtaataagtgaaatgaaaagtgatttgattctaaccaaagccacagggtgtcttcttcagtgagactgtagtgcacagttactacaggaaaatgctcccttgatgagagcctagaagctagaagctgaggaattggaaaagtagggggaagagaaacaaaacggtatttctgagccagccaaagctcagacatataatcccagctcctgggaaagttgaggcagagggatcacaagtttgaggctagcctggcccttacatgcagagacactgcccaaagagaagggagaaaggggaaaaaaaacaaagcaagaacaacaacgacaacaaacaaaaacacggacaagaaatgctcttttaagacacatcaaactttgaataatgttggctgctgagagtatgggctcatagcataatagcaaaccagcagctctggtggtagcaatgatttctggtttgtgttctctgataagattagaaacctgaatgatgacagcagtgaatctataacaggaatcacctaatatatcaaagatgagagaggtttgtgtttgagtgagcagcactttatccgtcataaaaatgtagcattttgtcttctggttttgatggcactcctttcggtgtactgaatcgagcatcagaaatacaacctttgtttagctgatcctgtctcctcagcttggtgtgttcattggggactgtttcattccccctggtcatctgaaacccgctatgtcatcccttgaccagtcacctttgcttcatcacgaggaaacgtctgtcttatttaaacagactgtacaaaaagaaaggaggctatttgaagttacactaagaactgttgaggaaactgaaagttatgtcccataaatcatcacaaacttgtaacttcagttcccatgtgtccctggtatctttcttacagaatacttactgtaaaagtatgccttccgaaccatgtcttaacaggtcctgtggaaaatgcaccacagtcaccgagacagtaatgagatagcaaggaaaaggtgacttagaactgaatactcagtgcttctctagaactgggaataagtaaatatatttcttaaaaattggactggctgtcttctgtgaattacggtatttgtgggggccggggagaaagaaagaaaatctaacaatgtgataaatgtgatgtccaagttgtccatagagactactctaggaaaagtcccagaaatgattctttttttccccatacacaatttagaaagctgcttttaaattgtctgtgatactgttttatatttacaccatactttggaaaattcaccttattatataagtattcttgtagccctaatatgtgaatgtaataacataaaagaattcttctaaaattgtttaaatgcatgttaatggatttatctgaaagacagacaactcaattcgaaagtgggtattttaattccaaagttcaaatagatgggtgaaaacatggtctctaggatagtatccttttatatactatgaaatttgtctttcagaatttagtcaagaggttacaggaagtggaaattggattaatttgggtgaatggcagaaacagaaaatgagaaaatacgttaaagttgtctatatcagcaaaactttgagataattcttaagctctctgatactgatccacagtttggtatctcattagatttacaattttccttcttttctctctccttttagcaatttagagaagaaagggcctgaaaggtgatttgaccaagccccttctctggtaggtagagcaatgtttaaaaatcttacagttgctggtccaacctcatgctagtgttgaaccaagattgatgtagctacattgttcgcccaccccaaattctcctagtaatgtcctaacccccacaggtctttaaaatgtgatcacgttttgagataaggccatttcagagatgttttggctgagttcagtagggtcagtcctaatccaatttggcaggtgttgtgttttgaataagaatggccaccataggctcatatatttgtatgcttagtcacaagggagtggcactatttgagaaggatatagaggcgtggccttgttggagtaggtatggttctgttggaggaactgtgtcactggggatgggcttggaggtttcaaaagtatacaccaggcccagggtctctcctcttgctgcctgtggatcaagatatagaactctagggaaatgtctggagatctacaaagatgacaccagctaacaatctaaacaacagaggagaggctaccttaaatgccctcccctgataatgagattgatgactgacttatatgccatcctatagccttcattcaacagctggtggaagtagaagcagacacccaaaactaaccaccgagctgaactggaacctagatgcagagaaggacgactgaagagcaaaggggtccagatcaggctggtgaaacccacagaaacagctgacctgaagaagggggaactcttgctccccagactgatagctggaatatcagcatgggactgatatagaccccaggaacatgggtttcagtgaggaaacctcggacatctacaggacttcctgtagaagttcagtacttatccctagcataggtatggactttgggagcccattccatatagagggatactccctgggccaagacacatgggggggggggtaggccctatcccaaaggatatgatagactctgataacaccctatggaaggcctcaccatccagggggagcagaaaggatatgtgataggtagggttttagttggggggtggtaggggaggatgggagaaagaagggaactgggattgacatgtaaaacaatcctgtttctaattcaaattttaaaaaaagttgaaaaaaaaaggtgtagaactctcagctacttctccagcaccatgtctgtctgcctgccaccatgctccttactatgttgacaatggactaaacctttgaaactgtaagccagctccaactgttgtgggatatttgattgcactgtgtgaagatgagtctttgtccttccttgcctgcctaaggtgccttctgattggtttaataaagagctgaatggtaaatagctaggcaggagaggataggccagatttctgagaagatataggaactctgagaagaatctggaggaggagatttgccaaccagatgtggaggaagtccgatgttaagtactgaggaaagattataagccacatggcagaatgcagatgaatataaaatgggatagtttaagttttaagagccaggtgggtacaagcctaagctaaaaggccataagttcatactgaagaagtctctgtgtcattattcgggagctggcagtacaaagaaagtccgactacacccaattaaagcctttcttttatgaaagttgcctttgtcgtggtgtgtctttccaacagcagaacagtgactaggaaagctgtgtagatgcacagattaagatacacaggacttggtcaaataggttaaatgtatttggggagaagccacttatataagtcacaggtgcagctgggtgcatctcccactacacagctggtattcttttatgagggaacgtgggtgctcacagatagaggaagatgtggtgaagacacaaagagatgaaggccatttgtaactgaaaaacaggggccccaaaagactcttcacagccctcagaagcagacgactctgtcactttcatcttcgatgtcctgagatgagaactgtaagaattgttcaagctaccctgcatgcaagacctggtcataacagccctagcacgctaatataaatgcaaaagtacggcctcttcctcccctcacactcctgagttgaagaacagcagtggcacatataaacctgggaacaaatcatagctgaagggatattcatcatgaatgatcacagaggtaaatggataagagaatttccatgaaatttatagtggaaatcacccaaaggccgacacaagccagacttcttcctggattcattggccatgcaaggctcactgccctacactgctaaagaaaaccacaaaacaacaaatgaagaggtgccaatcacttccaccagcttgcttcctagactcaccagtacttattaatacttgactgaaaagaaattctttaaaaaggcaatcagcaaatagtttgttgttttagcagtttaccaaggaataattctcaaatctaccagggacttaatgcatctaaagttgtgtaaaccagttaagtagtattgccattttgtatcactgctttgttcaaaaaatgaaataaagatttaaaaatatacatgaaagagataagtgaaagttctatgtgcttttacttatttcagaatgtataagtgtgcaaagtaaccccatcccagatgtgtcatctttctttcttcaagccagtctctggaaagctcaggggagaaacagtgcaatagcaggacttggttatgtccgtaactgaccaaccagcaagtaagacaaacagaaggaacccaggaaatcccacctggattctattttaagtttaatgcttaaagcttaaattttagagattaagtttaattttttaaagttagaaaagcaattctatgagatgaagggtgggtataactcagtgatggagtacttgcctaaaatgtgcaagtccctaggttcaattcccaacaccagaaaaaggaagaaaagaagggaagaaggaaggaagaaaggaaggaaggaaggaagaaaggaagaaaggaaggaaggaaaagaaaactggttctcagaaaccctgacatacataaaaatcaccattaagtaatacataaaaacgctaacaaataccagaatcatatatggcacgttttgataaaatgctcagggcttagcagcaaccttgagaatcaagatatctgcatgggagaggactactgggctgcagtgctgtacccggacccaggggccaactggcactaaacttgggagaacagaattgctacactcacccagatctgttttccaacagacattaaaaatatctaatatttaaatggttccaaaaagcaacacaaataaatgtataaattcatgtatatgtattttatacatcagcactacacgtgctaaacaaagcatagtctagaacaatgtgtagactattttttattgcattgttttgacaaaaagcagagagctgacaagttgtatttgaccaccacaagcttcatctctctctctctctctctctctctctctctctctctctctctctctctctctctctcacacacacacacacacacacacacacacacacacacacctccattacctcaatgctttgttctgtgtggtcaagcccacacctgatcttccccagactcttactctgagctagtcaatctttagaacctatctttatgaaaggtgtcacatgtactttacaaagaagtttcaatgtagtcatatcttaagctttattgtacacacggagtctagttatcaccaggagagttttcatcaaagttttgctatccttaaatgtgcctaaaataaactactcagagtcaggttcccaaagttggatccaacaccaactacttagctgtgctgaactgaactgccttcttgacatccgtggatcattactatgatggccgttgtggtcacagaatcctcagcaattcctctccattcagtgggccttggacaattgcttgaaccaaccgtaactgctgcttctaaattcccatgatgagggggtggctgggctgtgtgatagtacaaggagtggtaattaggatggccagttcatttctctcttaaaaaggaaaatttgctcaatctcatgatagcaatttcttgtttgcatagcaagctgttttcctgatgaagccagcttccaagcccctttcttctatttgagagcaaggatttcgaggggaaaaagaatggcaggtaactgagtgaatgtactttctgcttttttgaattatataaacacacccatgtgggccccaaaagcaaaaataatacaaaactagagactatggcacttccatgagtgtgcgtgtacactgtgtgtgtgtgtgtgtgtgtgtgtgtgtgtgtgtgtgtgtgtgtgtgtgtgtatgtgtgtgtgtgtatgtacaattggagttcagagagcaacctgcaagactgttctctttcacatcatgtggggtccatggacccaaatcaggttgtaaagcttggcagcaagcgcttctatccacatattttccttttgtggattttatttatttgtttatttgttttagggtgatgagatcaacctcagggcctgacacatgctaagcaaacactatcactgagctacttctcagatccaagaaacaattatttataaattataaaattaataaacaaaattattgtaatgcaagctcctttaataaataccctctctataaaatattgaaattataaaataataattacacaaaaacatacccaggttagtatacccagaaagtgtcaaggggaagaccatacattgcactgattaaatagtatgatgtacatgtgtggataagactcaggagccgtaagtaaaattttaaaatgttcccataatgctgatttttttcaaataatgaattactttattttccagtatttatgcttaatttcattctgtttgacaacttttaaatatttatctactcaaaaagaagagagggattaattatcctaaacttggcttcaagttgctttttaatgcattattttattgcaattttaaattgcatgctttttgttacttctcagtaagtggtctttggcacatagtataaaacatgtgcttggtaagggacttttggaactaagagaattcacccaaagcacaagttatcaggggcttttgcagggggatttccttattcaagtttctaattctctcagaaaaactgtgattctctccaactggcaattggattgtggtggtccacctccccactgagcatgcccgagcagtcagaaagttgtcttgatacactgacactcccaccctaagacttcagtctcaaagagacagcatcaaaccctggttcgtcagctcttttctggtaatctcagggtcagaataaaatcttttcctacattaaagtctccatctactctataggcgacaaggacggtagaatactttctgtttgttagctgtaactggtggccttcagcttaattgttgcttttcagtctttccacaatttaaaaacttgtgttttggggtgagagggccacttagttgggaaattcttgccctgcaagcacacgaacttgaattcaatgtgccagaacccacaaaacttgaatttttccacccttgttattgcttttgatttatacttagtcttgttattgcattcataaaactttcaagtcccttgtgggataaagaaagcccttccaaaaaaatatgggaaaaacattttttatatttctagggttgttttaaagaaaatgattaaattataaatgaagcagctgtctttgtccacgccttcaaaacaaaccaaaaaacccacagtttatgattctgctgtaggattgcttataaatgtgctgttctttccaaatcacctctcattttcttcaaccatcatttttaacaactgctctaagaaatatcaggaaagtggctgtccatagtgagtgattggtcacatccctaaataatgtggcatgaaacctttaaggaccttgtagtgctttatcacacacacacacacacacacacacacacacacacacgcacgcacatgggactcataactcttacacatggagtaaagtaaaagtaaattagactgcttttctatcgcctttaaaaatttgtgaaggttcgcaaacttcagacttatttattgaacaaaaaaatttccagaaactaggagaggaaaaagaatctctaagaagcaaagagaagaaagagaggcaaagaaagggccagttgctgtgtctataaatggcattggagacaggggaacccggggaaggcagtaaaagaaaacctatccccaaatctactccctggaaattaccagtatttaacaaaactcgcaggtgtgttccaattcacaatgcctctatttcacttatgctactactgaagaatccctactatacagagacgcatattttaggagatgcacaaggtgatacaatgttagaataatgggggcttcatgttggacaaggccaggttctgactgagtaggggtacttcagagtctcgtgtggtggatggaaggtactatgagatgcagcaatgattatgtaggtgaaagggttatcattacaactttactcctctgtctttataacattatttagtaagcattaatttcccaggcttaaatcataattttaatatttatgtactaatgcgtgtgtaaaacttcacatgtgcatacacgtattgtgtgcattcctttaggaagactgtttcttgggttcttgcggcacacatcctatgataaagacacagctgggcctgagctgagcatagctccagccttcggcatacttctcagagctgagagtgtttccaagccacccacactgcagtgacgcaatgatgacaagccagtttacaccaaggaggatcttagaacaccctaaaggcatttctaaaggccaaacattgtacagtatgtcttaaagaaccaaagggacatttttactccttcatgaggtgccaagtataagagcctctgtcattttactcctgttatactccgggtatcagatgcaacgagcaaactgtctagtccaaaagaaactccagttcctcaaactccaaaaggcagtacagatatccagaaatgagttcagcctggactgtagaaggatttctggcagttagataaaaaggcagccaaggagtcaatttcccttgctgctggcagaaggcctatcaggctatcacagtgcatgctggtaccacaagtactactgtagcatcccagcccttctcacctcctcccctaacctaaactccctccagctcatgggcttccctccccacagctactcattctccttatagccccgctattctcgctatgtactgccccacctctgctcctgcttctgtcgttggattgtctctgttccccatccctgctaccctcccctttctcccaattagctctggccatatccagtttgcttcattctctctgctctggctgttctttctctcgtatctacaacaaaaaccttccccttaaccatactgtgcatctgtcatggcgtcactttatatacctgctgcttctgtgtaccctggagtggtacacagagacccctttccaaggtgcctagcctctccaaaccaaaccaagctactgacttgacgctcctaaggtatgggatatttgtttcttctggctcctgatgcccaccatgccctactccaagtttcagagtcctcatcttcagctgcttcttccctccacctgttctctcctggaagctacttgctctttctctgtcagccgctagatagagcctactactgttatgaaagtcatgctgatgtgttctctctccctattcggaacccattgcccggaaagggatgcttctcctttgtgatttcagacttttcttcctgacaaggctctcagtccacttgggatgccctggattggaattttgtcacttatccgtctctcttccatccttgctttcctttcccaatgtggtctcagcttccctctggagcttgctctgtctctcttgtccatctcctcactctaatcctccttgctagctctgtctctcagctgccttctggagctaactctgtctctaaccatggctaactatttgtctcccctcatctctccatggagcttcctaccctgtctctatccttctcattggctcactggagcctgacattggagacctgcaggtacatcaggcattttttatgttctcctgagcctattgggatacatattctctctctctctctctctctctctctctctctctctctctctctctctctcttccattcagaatactccactcacaccttctctaatctcttttcttcctcagactcagagatcccattaagcctcactgtcttactacaaatggcttggcctcagtatagctcaacaaccaaaggtggcacactagatttccaaattctcacacatagtaacaacttctgccactgtgcaaacaattgatccccaaatctcttatctctaagccttctctgccccttgctcttatctctgagtcttctttgctctgtctgctcaagtctctcccctgatcactaaattcagttttacagagattcaaatgtcttctgtgtgtggataatatttaaatattgtcccatgatattccgctttatttttaaataatctggctcttgagttgggttatggcctccttctccaggtctaaaactgattgtttaaaagtttcctacaaaatctctgtcctgggtcaggcagggacacttgtctttctgactaggaggacagcaaaccgaagaacacaggaaaaaacactttatgttttaaaacagctaaaaagtaaactgtttcctttggtgatatattgtttatgatctaataaacgttgcctgtatatcagaatgcaaagctagccacagccgtagaagccaggcaatggtggcatatgcctttaatcccaggactcaggagacagaggcagatggatctctgtgagttcaaggccacccatggctacatagaaaagaatcagtctaaaagacaagcagagctcacgcctttcatcccagtactagagaggtatgtaagataggattagggtctcatgcttggcaattatcctccatccaccttgaggacaggaggcattctgtctccagccatgctgaggattcatagagcaaggatcatcctttcagtctgaggtagaggtaagagctagtgacttggctactttgcttttttgatcttcagcttgaaccccagtatctatctctgggttttgttttgttttgttttgttttattgtctgtgctacagtttccaatatgaatcatggctccttatctcatactactcttcttggttttacttaactctcttataattctaaaaggtttgctgaagtataaactttagctcaagatttgtaagactattgtgcaaacttcctgtatctaaggatttgtaacttcactgggtgtggttaaaaaaaaacaacaacttgtaaaatctgtaacaaaaagttagcttaaaatttgtagcagaaagggttcatagtttaaaaatctataccatgtttatagcacaggatgcttaccaagcctttgatcagtattgacctatgaacccacccaccagttccagaagacttggtttggatacttaagatctttgcccagaccctggagtctgtctggaagggactctacccagtcatcttcaaagtactcggtgtcatccctgaacaaggccactgtggatgatgtcttggaccttgggccccttaaagataagactgagcagagtttactaatctgggatacatgaatcccatgagccccaaacctggacttgggaattcagaaaaaaaagggggcggtttgagaaactctttgaatgcagacctctgttctcttatgtcccttccaggggagagacaggagtcagtaagtcaggttgaaaaggggctagaaaagggccttcagggattataattttatgcatgccctggcaaggccaaagtatctgcatcatgtcctcaaattgtctggcttgcttgtaccaatggtttgactatatgtgcctcctcggggccccctggaaagtcatttcccttacctctggcaagagggacatggcacctatggacgtatggcacctatcagaatatcaaagcaagtatctgttatgcatttcaaagtccatgctagcatcctagctcctctcaccttctccctactccaactcttgagctcaccagcttcccaccccctagctactcatcctccttattctcactatgttctgtgttttgctcccgagtctctcactgtgtgttctctattctttatcccctgctattctcccgtctgtcacaggtagccctcgccatgtccagtctactggctatcatgttcagttcatgttctttctttatatactctggactcttccgaatgcctctggctgttctgtcacatctatagagaaaaaaaacaaaacaaaaaaacaaaaaaacaaaaaaacaaaaaaaacaaaaacaaaaaaacttccccttaaccatgccacggagcagtcactcatcagcttatacacaagctgcttgtgcctgggtgttagagctgagttcaagtccagcactgccacaagttagatgtgttatcgctgcagttcttaagctctctgaacttcattttgatttctaaaagccagcagaggctgtcttcctctcttcgctgctgtgaaaatcgatgttataacatcatactcaggagtttttaggggtccaataaaacaatcagtctaaacttaggggccaaataaaacaatctgtttaaaatcgaataatcaaggcagcattcctgagcagggaactttcctgtagaggccaagtgctgggcgggcttttactcctgtgcctgcagcaggcaccaggctgagacccacagcccaagggttaccggacaaacttgctggagagcgccagcagagaaagaatcagagaagaaacaggacagacaacaacacaaaaatatccaccagtccagccactcacagtccagctgaattcccggaaggggagaaattggtttatttttccgcgttgtcacaagaacataaacaaatcttcagaggcttattaatacgaagtaactttcttaaagttactttgagaaatgctaccttcggactcctgggttgtaaccacagcccagagaagacttacttccccagctgaacgaactgtcaaaagtgccaagtgccaagtccatccatgccacacactcagagggaacccctctcctgccacaaagtggatctttgtctgggcatgtctcttgccctctccagccaagacaaagccaatcaagactcggccagcaccaagcgctggccgttccccactcacacttttctcagaaaagtgccagagctgcagggtctgagtctggagatcaaccctaagcaccgagccaggaaagaaagcagcttcccccgcccttctggacatccggacggaaaggggtggccgtcatgcaatgccagccgcatctgggttcccgcgcggtggtccccaatgctcatcgtcccatatcccaggcgtctcaaagcttaccagagggagggcagcccaaatccacagcatgtctgtgcctcaagggaaagccagcccaagtctccacctctcagccgggtgagtcacctacactggcagtctgcttgtcccacccctttgctctagatggcctctgagtgtgtactttgcctgtgcccgcccctggcatgttagcaacgtggttctcaaaccgcttccctccggtgtccccagaaatcgctttgaacacctgtatgtcacttttctgagggaccagacacacacaacctatgtaaagccccagtcagggtttgggaggaagttctgctgggctcaggggaaaaccactgactcatcaactccctggtggggggctggggagaggaaagccagagtagggcttgattgcacaactgggcattccccatcctgggtgcttccacagttacacccccagttcaaaggagagccttttcttccttttgctcttgcaccctggaaagaaatctgaactcctgagtgaactggcccttgactaattgctggagacaaagaccatcctgctttcgctcagccttcagtattttgtcagtgactggactgctgaggctcctggaacacctgaatagggtacagaatggtaactaccatagaggccatacagaccctgggatcctgatgagggagggtccctccatggagtccatgaatagtatatggagtgacagtcaccatataggaggtagagatactgggctgtgtgatcctgagggaaagcccatcctggctgcattccccaggtggagaacaaagctaaatggcctatgacaaatcacagagctgttgttaagtcagtggtaacagagctagaatccacagaaccacagaggttagctatagagcaagggacttgggcggtggcagaggatgggggcggggagatagatcttgttaggaaagagaaatagaagagatagttatggccggagggaggtggctgggatgggaggatcaggttggaaggggagaggagtaggaaagagagggagagatagctaaaattcattgccatttgggaagtaaaatggagacctgatacattcacaatgtgttctgcctgtgagatatgctagtgcaatagtgtcacaaagtttgtgagatcaaccaaccagtatctgatttgactttcggcccactccgaaagatggaacacatgcctgacattgattgggtgatcaagagccagacactagatagtccagggaccaagggtgaaccaaatcccattgttctaaaagaagagaaacattgcaaaaaagaaagaaagaaagaaagaaaaaggtcctaattatattctgctatacactggatcagtgccttgctcagccatcatcagagaagcttcctcctagagcagatgagaacacatacagagacccaaagcagacattatgaagagagtcagagaccaatgaatacacagctctaaatgggatgtctccatcaactccctccctccagggttcaagggaacagcaggaagaacgtgagaaccagaagggatgggggacacaaagaaaataagattctctaagtcaccatgatccaagctcatatgaactcagagactgaggcagcacacacagggcctgctcaggtctgctccaggcccgttgcagatatgttatgacttccagtttagtgtctatgtgggatgcctgagtatgtgaatgagtgagtgtccgtttcttgtgccttctcttggccctttcccttctgtttgctcattctgtccaatttcagtgagttaaattttgttatcttactttttcttctccttatcatcccttagaagcctgtttgttttctaatgacagaaagggagtgcctggatgggaggaggagtgagaggttagatgtgggggatagaggggtgggaaggacactgtaatcaggatatattatatgagaaaaaattcaattttcaataaaaggggaaaaaccctcacccagctgtattaaacattgctattacttcctccttttgtcttgattatttcctgaccaattttctttgaaaaaaaaacaaaacgatttttgtcactctctattgctctagttaattaacatagctcaaagtcactattattttagaaaagtagatagcactttagtgttgtgtgcaggttctacaaccttcctaatgctttgaccctttgatacagtttctcatgttgtggtgaccccccaaccataaagttattttgctgctacttcatagctataattttgctactgttaagaattgtgatataaatatctaatatgcagatccagagtactcacctggtattttcacctcttttcttccctggagaattcatctattcatctaattaagaacacacacacacacacacacacacacacactcacacgagagagagagagagagagagagagagagagagagagagagagagagagagaggagagaacctcctgcagcattttcttctgaattcactttagtgctctgaatctgggttgttgccctccttcctgtctgtatttttctgtttggcaggtgtctcagcatttatacccaggcaccacccctcacacatctcttgcctcttaccactccctcactatgtcatcttcctgtagattgtcagtgccgtgaggaagcctcagcctacaattattctaaaatggaagaaaggaaaggacatttgaaataaaaccttccctgcaaagagaaaaggaaggaaaagagaaaagaagggggaggagaaagaaaggaggagaagcagagggggaagcaggcttggggacaggcagcacaggcactcttgataaaatggcacttggtaaaaatcaacattccttgagtataaactatgagttagcgactttcactttccatacgttctcttaatacttttcaactttgtggggtgagcaattatagaattcctttaaaagtgctggccaggaaggacagacaacttgatttctatcaacagagctcacaccagaatgtgaaaactagtttgcaaagggtgttctctgacctccatacgtgtgaaccatggcacatataccatgaatacacaaacaataagaacaaagcaatcagcaaaggggtcaagaccatgctgggaaaatccacagaaacagctgacctgaacaagtaggaactcatggaccccagtcagacagctggggaaccagcataggactgaggactgatccagactccctgaacatgggtgtcagttaggaggcttgggcagtctatggggcctctggctatggaaccagtatttatctctaatgcatgaatggactttgggagcccattcccccatggagggatgctctcttagtctagatacatgggggatggcctaggtcctgccccaaatgatgagatagactttgatgattcccccatgggaggcctcactctcccttgggagtggatgcaggggtgggatgggggccagtggggggaaagaggatgggaaggagagggaactgggattgatatgtaaaataagattgtttctaatttaatttttttaaaggggggagtgcactgggggagggggaagaacaaagcaaaaaagtgtttagagtttcttagtctgtgacttctcatagtctttagtatgctaatatatattgataatataatatgtaaggagtgatcatacctcctctacccccaaattctttcttatagaatctttgaggaatataggttatataaattgaatgagtaaatcttaaatgtttatagtctgggttgagcactttggatatttgcagtgattagtctttgtcagttagacacaaatagagtaacctggcaagagagactttccattgagaaactgttttcatcatataccctgtaggaacattttcttgattgctggttgacgtgggagggcccagcccactgtagacagtgccacacctaggcagatggctctgagttgtgtaagaaagaaagctaagtgagccagtaagcagtgctctttcctggcctctgctccaggttcctgtgctggctttccccagtgatggactgtgatctgggagctgtgatacgtaagatgaataaaccctcttctgcctaaattgcttttgatcaatgttttatcacagtaacagaaagcaaactaagacagtatttctaaaggttatttctgttctacttgtacattttgaagagccctcatgccttcaagtgaaaaaaaaggaataaataatttgtgcgtgtatgcaaatgtgtgtccatgcatgtcacagagtgtcttttattactctctgccttattcccctgagacaggttgtctcattgaacctagagcttgatgttctgtgtcacctaaactggccagaggcccagaaagccagagagatcctcttatctctgtctccaccttgccatatctgaagttataggaagacggccatacttggcttgtttggtgggtactggtgatctaaactcaggggttcgtgcttgcacagcaagcaagcagtccctacccactgaactttctccacagctttaacacatgcattccttaatagcgttcaggcactcactggatgtggggaatgttttagacagtcatattgttgtactcaatccataccatgtaaattaaagtacatgtctcctgtaaagagaactacttctaaacattttgcatatcattcgcacacatatctgccttcataaaaacaataggtaaaaaacacatcagcttttactgccagcaatacctttgctctttccgcaatggagaatgttctaagacatcgttgtcagtcagactgctttgactaaatagcattaagttgatttaatagtttccaactgtagtgaacatccatgacttttttaaaccccaagtcttctctttcctagtaacaggactttcaagatggttctagaaaaactgcccatctcctctctccttgactatctgatatgagtggttcttttaatcagtgctttctagggagtaagaaacagaatcaatagaataaagaatggatgggtggatagatggatggagaggtgataagagagattatagatcttaaggaattagttcacatgtttacagaatctgttatgtatagagtctatagtgtatgtcagccaaatggagctgtagttgtagttcaaatccgaaggcagcctgctggcgggatttccactttctcaagggagatcaatccttttcataaagccttgagattcttggatgaggcctcgtcgcattgtgaaggctatcactttacaaacagtctatggattaagatacgaatttcatccaaaatagagtgtctcaaaaatatgaataatgtttgactaaatatatgggtacaacaagctactctgcatgacagttaatactaaccatcacggtagagttaacaccaacccctagtaccagggtaggtagatatgtgggttaggaactccacttgccaaggaaagcaacatatcatatctagttgtagtaaaccttggggtcatttgcagcaagcaactgagacgcaaacgctttctactggctgtgaaataggaacaaatctatctgtgagatgtgctgttggtgtggttggttgtggaaaagggttcatggtttcacagagctagaagcagagtgttcacactgaaaggaaatcatgtggagagatggggcctgggcttccacctgactcctggacgaccttcccttaggattgaaactcgggctccccacactgcctcacacagtcaattctcagcctctatgtaagccaaatgcttacacctctcaggttctttgggtaccattaaagcttatggtcagtgtaagaaatcctttgttaccaataataattgcttaaacattagctattctgttttcacacttaaataagaaagatacctccacactcccttagagactgcatgaagtccagggagatagttcctctacaaaacaaagcttctggcactagagggcatcagagcttacactgaccaaatgacagatcaaattttctagcaaccaataaaagtgtatttaggttcatagaaagggaaaaggaagaactttaagttcacaagtaacctgcagtactggtcattcaggtattttcacccccaaagactgtatttctcacagggtagagactatgtttacaaaaggctagcactccaggaggccagctacaaagtacacatggctagtcctaggtggtttgacaacttttacaactacttacttgtagccacagatatgaggaaaagggagataaattagctgctttctagtgtccttccccaggatgcttcctgtagaagcacgttagattcatgtgcctgaaggaagagcactgcccacagaaaagactcccagagcctaacaggggagagctgaatgcctggctcctgagatgtggaagaagctatttagtcttccaaattctccccagatgaaaactggcacaccaatatccctcttgaccaatcatatggagatgacaatgtgttgataaacattcagaaactgagatatagatatgaagggagcaaggctggcagcaggtaggtgggaaaaatagctgatctgcaggcccagacttcaatacccaagtgagcatcattgtcctgctatttctgcatgcagggctgcactaaacagagacattccaggactccaggcatgacaagtgcactaatcgccaggtgctcagaactgacacactgagggaacttgtcttcagaagtgctgacctggtgttgatggggtttagcctcaagtaggctccacttaagacagtgttagacatgatgatctctgcactgggaaagattggctgatgggctgtaaattactcagcataactcatcccacttctgggtaagtacttaaagcacgtgtccaaatgataagtgtatcatctttccataatcaacaggacacctagctaaaacagacatttggccaactgatgacaaataaaaattcgctatcacttagttaattattatcagtgtattagccatttctttcctttttctcttttggattcacttattttatgtgtatgagagttttgcctgcatgtatatgcaccacatgagtgcctatagcatgtattatatacatgtttaagtaaaatgtattttgaaaaatcaacttactttgtttcttcaatcattttatttttaaaacaagacatggcatgatagtcaaaaatggaaaatcaacattccttgccagaaatagaaaaaatctacaaaaataaatatgaagtaaaatattttcctgcataccacaaaaactgtttcccaagtcattaccagtaagatccctgtagctctggaagggttgggatcagacagggtagggcctactctcaaccttagcctgtgagctgcccccagttgacaaaccaaggctcttaaatgtggccttgagccctggcagagagctgatgggaaagaaaacgctgggccagggaggtgcaagcgggttggggtgggtgaaggcgttcatctctgaaggcccatcggttcccgtggagggagatcagtagtctgcctgctcagcctttcctggtcagcggaagctgagggacagctagagggagacaacggacagcaagctgggaagaccatatcgagccctaggcagctagagagacatcttgaaattgaagctgggagagagaggacaagaaagccaagccccaatttagagtctagggtactcaagtcaaagcagagataagcgtaaaaatgagtttctgcaggagggagctttagtcatttatataggtcgtgagattgctggctgatacactgggagcaggggaaagaatctggaaggtttggtttgtttctctgagaacacaccacacaagccatttattttgtgaagggtggactccagggacttatgctctaattcaactcttcactagctaagcataattttaacctctctcagcttcagttttctcactcagtaaatagaagcctattaaataataatgacttgcatgagaatttctcttgtgttctgcagttttattatcattcaacaaatgactttctccagaccatggggttcaccaacaccctttctaggttacctatcggtaccaacattgggacagtatgttcacctgtatcatctccctgtctagctcagggagcatatgattacttatagccttggctcttctactatgatcttatgcactgattttattttacttttctattctttttttaaagcatcagaaaacagctgcctctatatcttctatgttgccattacggcatacaacaaactaatccattcacaaaaaaaggaaatttattttgtactgttctgaaagctggaagttgattgtcaggggcctcatcccgttgcttcctatcactcagggaaatcctacagtgaaagaggagagacattctgaggtgagagaagaaagacatcctgcagagagtgaggacagacaccctgaggtgagagaggacagacaacctgaggtgagagaggagagataccctgaagtgagagaggagagacaccctgaggagagaggggagagacattctgaggtgagagaggagagacaacctgaggtgagagaggagagacatcctgaggtgagagaggagagacaacctgaggtgagagaggagagacaccctgaggtgagagaggagagacatcctgaggtgagagaggacagacaacctgaggtgagagaggagagataccctgaggtgagagaggagagacaccctgaggtgagagaggacagacaacctgaggtgagagaggagagacaccctgaggtgagagaggagagacaccctgaggtgagagaggagagacaccctgaggtgagagaggagagacaccctgaggtgagagaggagagacaccctgaggtgagagaggagagacaccctgaggtgagagaggagagacatcctgaggtgagagaggagagacaccctgcagtgagaagagtatgtaggcttaggtctctcttctcataaagccaccgcccagtccctgaggcttcactccccccaccttgatcacatctgactctaaatatttccaaataccccaactccaaacaataccaatatttaagtttgtagtttaactgttttttttttttcaatgcacaatctttggggacacattcaaaaccatatcaagtagtgaaaagtcaggatttgcattcccatgagaatctgttgttgcctctcagcaaatctcaagatgaaattagtttctctctctctctctctctctctctctctctctctctctctctctcatgactttggcatttagacaagcaagaacaattgaacacaagaacaagattttctgaggctgagagagctgcatcagtgggcttaggccacgtggacttttaaagttcttagtatattaaagcaaaaaatgccaatgaaattattgaaatgggatagcattagtgcttccctttggctcactctgacgttttcaatacttaaaccttaaattcagaattacatctgtgtcacaatgccttgtctttgtatcatctaagactttctgacctatggagtcagaaagttggggagagttggtgggtggaggagcttggaatcatgaaattaatatccaccatttcaaacctgattctccttcctctactactgggaactgaacaccactcttggtttaaatgcttccacaactggcttctaccatttcctaaggcagtttactcctgaattgtggtgatatattatttacgatttattaaagcttgcctgaaaattcagaaagcaaagttagccccaaggtatagagatcagacagtggtgaaacatacctttaatcctagaagctatcgagctagtggtggaggcacacacctttaatcccaggactcaggattaagaggcagacagatctctgttagttcagggccacactgacttcatgagattggatcagtctaaaagactaacagagctcacacctttaaggccaggactcatgagaggtatataagacaggaacagggtttcacaactggcgttcattctctagccacattgaggataggaagacattgtgccgcaggagtctccagccacattgatgagagcatagcagtctgggatttcagtctgaggtttgctggagctaggatagtcttaaagtaaggaagtggtaagaactaggggccggctgctttgcttttgtgattttcagcttgcagtttgaaccccaatatctgtctctgggtcatttatttttcatgctacaattagctcccaacatgggtggattgtagtgttgtctccctaaacagaagccggtgctgccttgggactcctgatacggcaacttgtctgggttccaacacctacatcaggcaggactgggatgatgtggacttcccatactgagtcaaatgaaaaatggccaaagaaaaacatggaaaagaatgcaaaatgtgtgccagaccattcacagggttttgttggtgccctggggtctgcaggcgcttcaagaagactgaagtgtgccaaacctgcagtaaattgaagaatgtttgtcagacctgcctgctaaacctagactctggcctacctatccaagtttgtgatacaggattgtcatttaaagatgacatgcccaaatcagatgttaacaaagaatattacacaaaaaacatggaaagggaaatttctaactgtgatggaacaggaccagttgggtcatttatttttcatgttacatgtaacagaggacattacttactgtagtttcacaaacttttgtttaacaatcgcagtgcaaagagcaataattacaagcaaaactaaaattgttccataaaaaaaaatgtggttatagggcaatggcaatgtggctcagcagataaaggcacgagcctgacaacctcagctcaagccacaggatccaagtggtaggagagaactgtatgtctgacatccccctataccctgtgcataacactgcaccttgaggattgttcatctaggcaacaagaacaatggggcagcctgactttctaattatagtaaactgggggctggaggcgcaatggatatttttatagcagcacccacactgagtaaagacacagagacaacagtgctctacctggcaagtcaaccaacggatttgtggagtttttgattgttttgttgagaaaaggtagtgtaaggtgttacaattttccatggcatataagcactcacgctggcttggctgtgtgtggatgctttccataatatcacctaagtttctcattcctctgggatgtacatccttgccgaaggtaatttgatctctatttgggctttagaagtggactcataaaagccaatgcctttcaaccccactgtgtcagtgaccttatgaccacgaaaatgcaaaacctagatgttttgttgttcaatcaaatacttggcttcctgctgattcataacaccattgctatattcttttcttaaatcttcagctttcttgggctggaaagatggctcagtggttaagagcattgacagctctttctgaggtcctgagctcaattcccagcacccacatggtggctcacaaccatccataactgtagtctcatgggatcagatgtcctcatctgctatgcagatagatgtacatgcaaacaaaaccatccatatgtgtaaaataatcaaatctttaaaacaaaattcttggcttgaccaacagtgaacgaggaacctcttcattgcatccagtacttagagaaggaaatcaactatttgtacctattctcttttgtaagaatgatagccaacaaagccacaccaactagatggaaatacagaataattaagatggtatgaccataacttcacactgtagcttcctgactttcaaatctcaggatagaataaatcatagatagctgtgaactgcaaccatgtttggtggtgcatgcctggaatcccagctacatcggaaattgaggcagaaggaacacactgagcttcttaagaggctgaggcagggggatcacattgagtttcttaggaggctgaggtagggggattacaagttaaaggctgttgtgagaatttgatgagatgccatctcaaatccaaaagggtaggggataaagagggcaggctcagtggtagagtgtgtgtttagcatgtgctgtgagaccctagattccagccctgataccacaaatatttctgttaagtttggaatctaatccattcaagtcttcagaggataaatggctgtagttgaccacgcaaaagtgttatcatgacctgaacaaatgagggcagggcaagagtgtagccaattcctgaaaattatccatcagtacacgaaaacaaaactgccttttttttctgccttaacagtttcatcagttgtattattatgtgagcatctttgcagttgtgtaggggaggaatgccagacagtgagttcgatagcctactaaaaggcatattacctagttcttatttatgatagcttcatgttataaatgtgtttttgggagccacacttcactgctccagagaccagtttgccttgaatgcataaacacatatttttcctatcaagaaaaaaaaaaaaagcctagtttcttttcaagcacacttggcttttctgtgaactgaaggaaaattggctggatgtctgctgtgtccctcggccaatcaggagaatgtgaccataaatgtccatgaattgccccttctgggaatctctgacttttttatttctgtcctagggacttgtatcttacagttctgtgccacaccctctgccttttggttctgacttttcccacttctgaaaagacatttgaattcagtatgattgctcatctaaaaatccactacttcttacatgaaaagctcttagctaactcctacactggtgttggttcttctaataatcataattaacccatctagagcactcactcagtatgagtcaggcataattgtaagggttttataaatatggttgtatttcatgctcacagaagttcccaggatgccctgcttcacaggcaaggtagcaaaaggaacccagtaggaaggatcctgcatctgtcacccagtgagtaagttacagagatgggatttgaaccaaggcaatcgttcccctaattcttcaattgctgactttatacatcttaattaattgagaattcaaaatattccagaccctttgggatatattatcttatttaattctcagacttctctgattcatataaatagaagaaatctacattgcaagccaggcattaaggtacatctgagtaaactctgtggttcatacaatagcatgatactgcttgcctttttgtgaatgagaccatttgctttgttttaaataaaaaagctgatcttaaacctctcaatagcccacgttcaggctgaaatacatagtattggggaatcatcattacccaacatcttctccacattttcctcatctctacttcgctattttcccacccttctcaaggtctctttctgggacatcacctggctatctagctctttataacaccattaacaaagtggatattggagggctgggggaaggcctgtatccaacctgaacttggctcttcctattgtcttaggatcagatttcttcattttgtattcctttccttaaatactaacataggtctcactcaaaatggacattataggctgattctcacatagtaaattcaactaaggcaccaaacaccatagtccaccaatgtggaagtattaagacatctgccagtcctctaacaagtagacattcctctgtctgcccagtgattattatggggttaatatttttcaagagcttaaacgcatcaaacaactgatatatacacaaccttatctgatcttagctttcttagtgtctactcccattcttgtccttcatatggggaaaccaaagtctggtgaatgaaaataacctatacatggctggtttgtgtttggactgaggctgccacacaggtctgaagcctcttttgttcacagtatcagctgagccacttcctctttgatgttatcattccctaattctgagttccttaaagctggcctctctgtgttctgtccccaccctgtcacccagatgtctcttctaaaaggaccctccctgagtctcacttcccatataaggcaaaaattaaaggcttgtagcctctcctgactcacattgcccaagtctgacctttcaaacttagaacctccttggcatgattgaggagagagtgggaaaagtgcagtggggtctgtgacatgtagcttcctgtcttttcaaatgaatatttgaagtcaatctagagtcggctgaaattgcagcattgccttctacttatcagtagctacttgatcttatatggcatgtacctgagaggatggtatttcctcctgtttcttttcaaaaatatatttctcttatttttgatattataatataatatatcatttccctccatctctttcctccttccagccttcctgtttctttacatggagaatctgagctttaaatttggatcccaaagtctttccctaattctacaactactactaaggaccaacagtactatggaggttccacagaactgctgtaggtagttaaggatggtcccagtgtcatttcaagtcctgaggtacaagaatggacgacacattcaaggacctgtcgtcgtcatccatggcctctctgcacctttatagggcagacaggacactccagttctcatcctgctctggttattgccttcctgactctgttactgataggcatggcacccttccgcagcctctgttccttcaatcctaatgtgaaagaccaatggtctcctcttccggggatggatatctatctatacctcatgctccagcttcttgactttctatttcaggtgcattctgtgcactttccatatatttttctgcccattcttactgtgcctaaactaaactctttcttttatacctgggccagaaaaccagaaaactataatcagtaagtaactaaataaacaataaaattccaaaaggaaagaagtccattattaggtcttccaaaacacaggttttgctcacaggctttggctttctttgtctgttagggtccaaaattagcttggtggggttttgacagcaggaactctacctttatatgctatgttatgtaggttggcttcaaattcactatatagctcatgctggcatcctgcatgccagaataactggcatgtgccatcatacctgacctcacaaagtttgttttacaacagtgttcttaatgctgacttattgaatactgtccacacagagaaaaacccagaatgattgtgtaggtacactttaacaccatcgaatcaaaagaccacggcagaaccactgttaagtcaggaaccttctgaactttgtttttctgagactttagtcttttgatctataacatgagtgacaacagaatgatcttccatttactatgaaggttaaaggtgatagcttacataaattatgtttcacagcgccagtcatacagtaagtccttaggtaaaattctagacattaaaaagggagaagggagctggcagttggtggctcatgcctttaatcccagaactcaggaagcagaatcaggtggatctctgtgagtttgtggccagtctggtctacagagtaaattctaggttagccagggtttttatacaaagaaaccctgtcttgaaaaggcaaaaaagagagaggtggtttgggtgagggagccaggtggtggtggtacatgtctttaatcccagaactcaggaggcagaggcaagtttttggccagtctggtctacagagtgagttccaggacatccaggctacacagagagaccctatctcaagaaaacaaagaacaacaacaaaacaaaacaaaacaaaaaaaggagaatcatactaacctcaggaattataagaagcctttaaagtaatcttgcttagatctaacatgggtgagtagcagagaagactgaggttaatagtcccccacccttggtatgttcccacgagaccttcccttccttggtagtaccgggtactggtgatctggtgtcaatagagtgtcttctcttactgggcccagtctttcttcctttttgagattgagttccaatagaggcgagcatctcccctccctcacccctttgttgatagggaagagtggtgtggtagatatttgtgctcaaagcaggcaggttatagtgtacagctggcacctcatgagcagaagccagcaaacacatgcagagttgtttcctgggttttccatggttgtctgaaagaggtaaagtgctaataaaatgtttgaacagtccttcacaaaagtaataatcctttaggtgccaggggagcaaccaatctatcaatcatcaatcaatcaatcaatcaatcagcttctctaatgggagccccaaaagttttctttgctgattgcccaaagaaatctggagggcacagtcaaaaatccccttagccagagttaagtgtctcaaacccagtgaaacaccgctatagatactggtattctgttaagtgtctactacagttcagttatgtttaataaaagaattatcgaattccatatgcaaacctcaggttagttggagtgccatcactctcaatatttggtgcttttttttaaaccaggattatcattagaggtctatccatattcaagacacataagtgacatgttagtcattttcaagttactcatggggaaagaggtttagattctagaattttgagaccaaatgatttgaactaggtcaatgaaatataaaggatatttaaatgtgatgaatgtcttcctccattacatgacctttatgacaaacccacacattggccttcattctctcaatctgtatgtgtgaatacatactgtctcttgcctttactgtgaggcgtcacaatgcagtttgttagcacattactttatacatcatataattgctataactaattaattaaggatgacagtctgaggtaggatactcatatagaaggaaatgtaagattcagtggtggggtaattagatcttagcctaaagtctgagaaggaatgtggattcaggtgataattaattggtcaatctaatgaggtggcctgcatgataacaacattcaaagttaagctcctgactccagttgtgtggctctgtgattcagcactgcagtgctggtccgatatgctaatcctacactaagtaagacaactccaaagttgtgtgtgtgtgtgtgtcggggggggggggggggggaggggctccaaagttgtgaactgccagggaattgtcttcctacctgagtccattacatagatggccacttttacaccatgaggcttgagcaaggaagaaataagagaaaagtgtctgtaagacggctcagctgataaagtgcctgcttgagttcactcccagggtctcacaaggaggtaggaaaaaatggacccctgcctattgtcctctgtccttcacacatgtgctgttgaagtcacattcttacacatagaaacacacacacacacacacacacacacacacacacacacacacacacactaaataataaatgtgataactgttttcttaatttcttaccctcccccctttacagtttaggaaaaaatcaggcagggcctgagttctgctcattccagagttcaaagatgtgttttctggaagctctatttgtctgggctcttttctctgcattggagatttctgacctatcataacactgagaacggagaatgggcagagattttatttcttctgtctattctacaacaaacaatacacagattcttctggcactgtgtgtgtgtgtgtgtgtgtgtgtgagagagagagagagagagagagagagagagagagagagagagagagagagcttaaggaagaaaatggcttctagagggagagagtcagttttcttcaaggatgcggcccctgctacagtgaatggccctgaaaccccaggcactccagctgtgctaactaatctcagtgttttataatgaaaaataaaaagatgtgaattgggaagtgaatgagggagtctgggagacgttggagaggggaggggtgggtgtgataaaaatacattgcactcgtgtgtaattctcagagtaaataaaataatttgaaaagcagaagcttattttcctactctttagattcctagcctttaatagcttctgggttttggccacaggaatgcgctttacctgttcctatcaataagtgagaacattacttaaacagggctgcatgccacatatttcctgaccccaggacatcagaacatttgtcagattccaaaacctgcttcctagttaggagaaaagggatttatttatttatttatttttttaccaaacaaagctcaaagtgactttgccatggtcaatggtcagatggaattcacagaaatatttttattacttgcgaacccttagctgatctgtctaggtactcaagaagagtggcccttaataaattgcattctgtgatgggactgtttatcctaagttttcagaccaatagataaggctttagcttcaatcttccctttaaagcataaagcacaatttaaagtgccagccttcacatgtgtctttatggggaaagaagaatggtcttttgtttgcattgagagggcaagctctagagagagggcttgagagcttaattgaattactgggtgactaattaagctttgagaacttactccttcatcaagtagccaagctacttttttatcattaaaaaaaatcatttatgaatattctcaattattccggactgtatgttcaggactgtggtgggaaccagcccaacagccccagggctgatcctgagtggggtatgtggacatgggggaagctaactacccaatgacattaaggatgagacagagacatccggtaatgtcaggagggatctcagtcaatactgaaggccactgtttattgttccataatcttaagtaaccatcccaaaggtgggggcaatggcagaagacatctattatcatgtataaaggactggtatcaaatatttcccttattcctagagatacttttatatagcacttactcactagccctcagggtaggtgtagactcgccctggcccaggtcttttgttacacagaaataggagccatacacaccaggtatgtggaggtaatcagcccatatctaaaagacaacagaagttctagaattcatggctgggcagggcatatttctagaatattgccttgggccccacagtcaatgtttcagccctaattttaaactttaataatttaaggcttttggccctgtgatttggctcagtgagtaaaagctcatgcctagcaagcctgaagtcctggttcaagccctgagaccttttcagcactcacaagatgagatgggaggcagagaagggacgatgtttcaacagctctccagccagcagcctacagtatgtatcaaggcggaaatgaaaccctttcttaacaagctgcaagggagaattggctcctgtatttctctctctctctctctctctctctctctctctctctctctctctctctcctctctctctctctctctctctctctctctctcctccctctctctctctctttctctccctttctctatcatacacacacacaccacaccacagataccacacatgctataataataataataataataataataataataataataataaaaactaacactctgaagtcacataaacaactatgcaactggcatcagtatggtttgactctggaatgcctccagacagccacattttgagcacttgctccttagtgccttgtatgattttgatggcatcaggacctttagaaggtgagggctggtggcagattaaaggtaagtctttgaagcttatgcctgcctctggtggtcttgggtttttacttcttcaggtctgctgcatgtgaagtgtctctactctgtgcttctgttgctgtaaactccaccatgccttccatgtcatggtagactgtacatgagccaagggtttggagagatggctcagcagttaagaatgcgtactgctcttgcagaggacctaagttttgaagggaccagctccccatttcggcagccataacagcagaacacgtgcttgtctgaccttgtcttagtcactaggaggtcagatgcctgcctcgtggcaaggaaccaatcaggaattagctggtggtgctatgctttacggctctgggtgtgctttacggacaagtacacagcaatgactcgaagagcatagcagccaccctgggagggcctatgggccataacaaccagttgaccaatcaacacagggcaaaacctccaagcctggaggcacaccaatcctgagtctgtgcatacccctagacactccctttacgctgccctataagatctctatgcagaggcttcgagctgtctttcctagccatccaccattaaacaacaatagcttgttaaacaacaataaagcctcgtgcagtttgcatcaagctttcgactccatcttgtgattggggtgaccgcagtcctgggctgagatcctggaggtctgagcttccgggggtcttacagtttatatagtggaatattattttaacatgcattacatttgtttatgttgtggagtatttgtttaaggatgcaaagatgtgttgcattcctttatggtgcatttgtttaactctgtgaagctgtgttacttggcctgtctaaaacacctgattgttcgaataaagagctgaatgaccaatagccaggcaggagaggaataaataggagggaaaattgaggagcaagagaacaagaaggggagtacactagaagccagctgtccagccacacaaccagccaccaagtaagatatacaaaagtaagaaaaggaaaaatcccagaggcaaaagatagacaggataatttaagaaaagctggctagaaacaaggggagctaaggatgggtatttataagtaataaggctccatgtgtgatttatttgggagctgaggagtggcggcccccaaaagagcaaagagagcaaaacaaccccactacaagttgactcctaggacccacattgggcgactcacaactacctgtaactctagctccaggagatctgacaccctcttctagtttatgtgggcacctgaatacatatacaatcagccacacatagactacatatacttacataattcagtgtttttaattttttaaaatgtgagccaaaatacttcccctcccttaggtagtgtctgctaggtattctgtcattgtgatgcaaaaatgatgaatacagtaccccaaccacggcctcagtgtctgagtctgacattgataaactgattgctgaggatgaagcaatttagctcaaggaaggaaggaaggaagggactatgtctaatgaattgttttcttcattgtgaattgcaatagaagggtttcacacttgttgccctggaaacttctgggattgcccaatcactttcctgattaaaacgttgtagttcctgcttctcttaaagttgtacagacaggggctggagacatggctcaacacttaagagtgctggctgtcctttcagagaaccccacttcagtccctagcacccacatggcagctcagaactgtccgtaattccagttatgattctccaggtcccacatgagaaaggcaggaggcacactgacatgccatgaatgccatggcaaaatggaagtagagaaatgaaacagaaactaaactacttttagaaagactaaggattcactagtttcctttttgaaattccctatcagttcaactttgattttggttttatacaatgtttttcccaggaacatggtccgatatataagcatataagcaccttcaggttcacaatctttagactgtcatccaaaataccttcgagtactatggaacttcttttaggattagacagaccctggtaaccaaatcagaaactcattacagggtaaatgtgctcacttagatggtgtatatacaatattagaaacgatggagagaatactaaaggaaaagctgtacctttgtatgggcttgctaacagtttctacacgaaggaacatgtgaagtaggctctctgagggttttaatcatttccatcagtgaggcagtattaactccaagtgggcagtgacttttaaacatatatattgcaatccttagaacaactccttcaaaattacagaaacagacataacatagtaatgcacaaatttgtgtacaaacaaaatactcaaatataatagcagaaagaagggaagacagaacaaaataacaaaggcagcatgtgtgagctggccataaaatggctgagctaatttaattttaaatattacattatttgttaatagactagtcataagaggatgtcaaccatgttcctaaacctctttttgtgacaggttattactgtaaaaaccgtaatccatctctcatattcttgcagttcaaagcccagacagcaactattttaaactgatctcttcttttttgtgaaggtttggagattttgtttcatctcatttagaatggccaattaacaagctgccccattagctagcagtgttaaggtttctacccttcttcatggataaggtgtcaagaaaccagatgtgtatgacatctctctatcagagcaccaccctgtaaccattgattcttggctggtttctccagcaaaataagcagcaagagcaagaagtgcatattgtcctaattgctgctctcaccctatacccatttgtattctagatctgcattgtcaaatgtcacttcctattaacgtggaaataaaaaggcaacttttaaagtggttgtcattcatttctggcaaactaataaggggagaaaacaaacccaaatatttagaaaggaattagataagtaatatttggatctaaccttcatcaagtgatatctgagaaatgccacccattcttagtttattttatttagcacatcacttagatcctgatatgaatttaagtggaccatgtagacaaggaatctcccttccactgatacatcttgtgtagaatttgaccacttaaatttactttaattaattgactctacatctgctattattattgtatattgtttaatgttatatattgtggtatgtgtgtgactgcaggcaggcacataccacatacagggcacatgtggagactagaggacaacatgggagccaaatctcctcttccacagtggatttcagagatcaaagtcaagttgccaggcttgcatgagaagcacattttctcactatgccatgtccctggcttgtgatttgcctgttctgtggcagcatttatccttagatgtatttatttgatcaagttatgcctttgaagatagcaaataaatacattatatattaccatacccacttggagttgagtgtccattaagtagttgaaatgttgaacatcaaaaaaagtgaagccaatgaaatgccctgttttgtccagttcagggaaatgcattccagctcaaatccacagttgactgaggtttgaagattagattctattattcgattattcgggaagatgtctctttggtgtctttcttccttccttccttcctttctttctttctttctttctttctttctttcttcctttctttctttctttcttcctttctttctctctttcttcctttgtcttttcaagacaggtttctctgtgtagctttggagtctatgctgcactcactctgtaaaccaggctagcctcaaactcacagagattcacctgtctctacctcctgagtgctgggattaaaggtgtgtgccaccaacacccggctttggtgtgtttctcatggattaaggaaaaggatagctgttctgagcggtggtttcctaatgtcgacatgaactcagatgtatcctgttgccaaggatgcataagtgtcgacttgggaattctagagctagctgacttatttctggactttcccaatgtaacattaacattctggtctttcccattctttatcactaacacgaattgtgcttaaagactcattagatggtcccagcacttgtcaatgggtgttctcactggtgtggctcacccgaggaacagcaagactggatgcagatgaagctggaatttggagaaaagctgagcattttctgcactcaaagagaatcaaagtcacacaaacacgacaaagactttgtccctcagtaaagaatgagtgggtagttactttgatgaaggaatataaaaatgagtcattcctaagtatcacatcttgaatttcagcaataagcacagactatatggtgtttggagattgaaaagtagtctattctagaaacttgcaaattcatatttccttccaatatcagtacaattgtatatggaggtaatatcaatatattttccagaaagcacttatttgtcaaaggatcataggcattcacttactcacacactcatcataaaagcccaagtgggttttatcattaaacaacatctatgggagcaatatttactggggacctcctatgctaacactgtgtgatagacactgggatccaatgcagaactaaccatttgtcagagtccttgatatggcccaggtgggaatgtggatattaaagaaatcccatcatgtatagatctgctgttatagactacagtcagcataggtaaagacagtatactattaagtctataagaagacctaagttgggtatggtggagtacactggtagtcctagttagttgggagactgagggaggaggatatccttgagatcaggtatttgaggccagccttaacagcatgccaagacgatgtctcaaaaaacaaaagtgaaaagatctaattgagaagaggaaagggatcaagacagtacttcctcccctgaaaaaaattcaccatccatagatttgaggaaaaaaataatgatgaatgccaaaatgctttgataaaaagataactggagagacagtttgaaaccaactgtgttttctgccgttctagagtacctaaactaggttcccagcactcgtgttgggtgacccacaaaccacctgtacctccaactgcaggggatctaaacctcctcttctgacctcagagagtaaacatacacacacagacacacacacacacacacacacacacacacacacacacacacacacacacacacacaaacacacacacacaccacatcactcacaacacatacacacaaataaaaataaaatatccataaaatctattcaaaacagatcaccagagtccaaagctccaaaactctcctgtgtgtcatgcaggacactcatgctttttctgatttgtaggctctttcaaagagagacatcaatggctaagtaaccattaggtcttataagcataggtttgggcacatctgatacccaagatagagcagtaagaggaaatactaatttctttcaaagtagcaaaaatttttaatagcaaaattatgtttgagaagtaagacaaataacatgagctagtcagtagaggaataaaagctaaccaaaagggcaaattctgagttctctatccccataatttaagtaatgatcaacatctttagttctccaactaatatcttatttataaaagttcttgtcttgaatactgtttaggatggaaggggaaaaaatgaaaaagttctactacaacccagaacaatgctttccacatgctctacaccttacatcttccaaagcaccttgccctcaggaaggttttctttccagatacatttcctatctttagtctggggcatggaaaccaaaccaggcaacctgctacccccaaacactagactcccagagtttggaaagaaacatctaattccctctacctacatcttctttccaagaaggctctcagagtattccttcggcacacacatataaattagtaagtagaaaagaagagagaaatgcctaagtcaatagctgcctgggccatttttagcagaggctcattccaggccagccagtgagaacgagaagcaaaggcctgtgattcagaagctgctttcccttataaggtcaaggatcttggggtggtattttgactcctttaggaggaggcactcacttctctgaggaagccagaattttctgttcctctctaccaaaaaagtatgccactgacaaatatgtgttcaaaatgcagactgtgcctgcattctttcaggttggtgcagtgcccttgttaccaacatccacagctgagttttggactaaattcctgttgtcatggattcaggaaaacaaacacttttcagttgttccaacttgagttttaaacccaaggtgaacaaaagctgcatggagacttgtcagggtcttgtctctgaaaggactagtcttctgacatcttagctgtgaaataagaacatgagttaaatgctaggacagctaggactgcttaaaaccatcatacaaattctgatcagtccaacattttggctaaatgagagaagctacacataatttcaaggacttaaatccacattagtgtacaaaaatgcaaggtaagtacagataattataacaattcactcctgaattaattaccttctgaaaaataaaaaagggttatcatcacaacatacctcaagctcacaagaaaaaccccatttttgttgtatgcaatagcaaaaaataatttttatctgaataatgttgtttgtactatagataaaatataaccatcaagtatgactggcatactagtactctcctgggattttacagaagtgaagatttagatttgtgagtgatgagaggattttatgtaaggtgtttgatcatgcttgtcagtttgcagtttctttatcagatcaaaattttcatgaagaccctgactggcaagagcatcacccagaggtggagcccagaatggggaagccaagatctaggatacataaggatggcaatccacagaccagccgaggaccatctttgcagcccagaagcaggggcatggctacatgtttctaactataacacccagaaagagtcaaccttgcacctggacctacatctgaggtgtgggtattaattcttcagtctgcatgcccagcaggcgatgatggcattactctgcactgtagtcatttgcttagatttgtgtttacaaattatgtttcaataatagctgtatctcttgttaaaaatgttattaaggtttcgttgaatggtaaaaataataataataataataataataataataataataataataggtttatgcttattccaactagcacaaaaaaggggtatgatctcattctccaccctcctgctttgaattaagtggtaactgaaatgggctcctgtgtgtgaaacatcattgcttctggactggtggaagttgaaagtctcactctgcttttttatcttaattgaccctttcaagagtcaaatcccagaaagaaaatcataaagcaaaatgttttgctttatatgttcattctccatctgtgatgtctcaagaaacatcggccattgttctgagttttgctgctgtttgaaagttgttgccaggtgtgctgcagttagcagttttgggggtagcaatgtggactgtcacaaagtgcatttaagagtggaacagtgccaagggtcataatattgtcaccagaatccaccacactcttgtctgtcttcatggccatctacaaaagaaggggctgtgtcattagcatttcagagataacaaaaccaagcaggtaagattcaaaaccaaaagaatagaaagaagtcgatgaagcaatgatccttgattccagcctaattccaaagtccacacttcggcttctgtttcatttgtcttttctcacagataataagaatcttgtctggctccagctatctcaaattccagtcagattttcaaagaggtgggagcttggcaggatgaaattaccctatagggtctcaaagttgtaggcaaggaaagagaatgtctgaaattccaagtcacagcttctaacattcttaaagcatccagagataggtcacagggcctctactgttcactttcttttctggggcagaaagcatgtctgatggtcagagtggcatgaactcccagcatgatcttggctcaaagccaatctcttcactgttcaggccactttgctcttcgggaatggatcaagtcctctgatggaaacttcagtgtctgcctctttccacattactcaacagcaaatacttccatacttgaacagcttaggtgacaacagacaaaagattcgacaaattgacattttatagcttccataattcttgagaaggactgggatggagcccagagataagacagtccctggtacttcggacaacaacaaagccacttagtcattctcttgacctagcaggcgtggctgtggtgggaattgagcaggaggtgacttgctgctcaggcgatatgggactgactcttcgtgtgttagtggcctcgtagtgatcgtatcttagtcccatttccctttatgatgctatcaacttcactggtagatgccacagataaatagaagagtttaattttctctttagatttttcaaattcaaaattctaatcaaagatggttagaagtagaaataacagtaagtggacagctcaaaggcctgggggttctgtgaattgttcaaagccctacagacgactctcagttgtaaatacctgaccagaaacacaggcatgaagctacttatctatttcctttctgttgtgctgtcctggggacttgtgcctcgggtgctgcagtctaaccggggacaattatagaactgatgttatcgctatttttgcatgttttgaggactcgtttcacattctcctcctgtcctatgtccctgggtttttgggaggctcttgcttcagtgcaagtctgtctactgaacatcagagagcctggctcaaggaggcctaggacaatatatcttatttgttgattaagtttctggaagtttaggccacacttaaggaaatttttcttacagctcttccaaggactttgttagaataacggcagtttatatttaataatcaatttattttttggaagggctatccacaaatgaaccataatagtcgatcgacagcaaatgtattgaaaaattgagacctttccaatgaactttgctgatctttgaggaagggcttccctgaaactaaggaatcctgggaaaagtctgtgctgttcagaagtgcagaagaggtctggttgccacagttggccactttgcctaatgatctgatagcctaggacaatatgtgatccctctctgccctgtgtgtgagctttcagttgttggataatactgatgtgccctgtgtgcctaaattcctgagcaaggaccctgggcagacaccagccacacaccttactaatcccaagctctcagggccacgctctcaggattgtaataaatatgaaattcctccaaaaggcctagaaccaaatagctcctcttatcgtatgcaccttacctactcttttcttaaaatgaatgagaaagttactgaaaacaagagtctgagatgtttactgtagctagctctttgcaagttgtggaagactgcattcctgaacaggctggcctaagggaataggcaacatactggttctttccaaatgtttgcaaccccatagttgaatgtaggaaaactgtgagaaaagataaatgctgacagaagttacttgtgttgaatgcatcactacaatgatgggaacattatctgaagctgtgaaaaacaggggacagggtccagaagaggcgtgcccttagggttgtatcttgtcccaactccttgcatttctttctctactcccggactgctgtaatgtaactgctctgccccacattgctgtgatggtgaactgacaccactgaaactacatgccaaagtaaatctgcgcccctttaagttgtctgtttcttattttgtcacggtggtgaggacaggaagtaccaggaaggacaaagattgattaccagagaccatctcagtcaactgcctgaaggctgatgtagaaagctacaaaacaatctatgactagcatttatttgccttttagttcttacctatttttacttttccacgaattgacacccctagggactcaaaggcatcttctgtgtctaaatatctctaaacattgttatatagacaggctctaaatcacttcttgatttagagtatccattccttagatactctgttactcaactctcttttgttgtaatgatctgagatcaacactcagaaaaatagatgattctttttttttgctgggcaatgcaaaaatatgtatgtttgtgatatatgagcgccaagatagggcctatccaatacaatgaggatcagaaataaggagtttggctaaacaggtctttagtgtaagctagaaggtaattggaaatcataacattgtaacaaagtatggatatgtagagaagggagaattggggataaatctgcaaaagaatgggagtggtttgcacttacaatcctgtacttggaggctaaggccagaggatcactatggatttaaggccaatctggcccttaaaaaatgccaggccatcacttctcagccttttggctaacatcaagtgtaaaaagtgccaggccagtgtcagaagagatagagagaagggagatgggcagagggagatggtgggagggtggaaaagaatgaagagagaaaagaaagtataaaaaaaatgaaagcaaatttgcacgaatgtttagttaagagtgtgttgcacattttggttctttatacactggctggggatgtcagtctaattaatctagaactacattcctttttgatccaaaatgtcaatatccaaatctgccctgtcacctttgacctttgatgaaaatggttttgtgctgcaggtagagatttgtcaacactgaagaaatcccaaagaatttgctgttgttttaatccataggtccagaagacatggggactgtcacacattgttgaatagtttaacttcctagaaggatttctagagagaggtaaatgtaacttggctgtctaaagccagttgactgtaaagaattaaaatccttgggtactaatcacaaccctccaagtaaatcagagttgctgtttaaatccctgctcccaaagggacagaaactctcattcaccaaataacacacattgtaagctctattcttggaggcatgttagacatgaaacatatacaagttttcttgttttgtgaatcattggaaatgaagacagaatacttagggattactcagcctttgttccaaatactgtttcccccaaatgctggccagatctgtttatgacaagaaaagctgtttgaagggctggaggcatggatggatgtttaggagagcctgctcttcttctagaggacctgagtttggatttcaacaccaggtgatctgatgccctcttgtggctgttgatgtacacacatgtgctcttatacacacacacacacgcgcgcgcacacacacacacacacacacacacacacacacacacacacgaaataaaaaaaacactttcttttggaacaatagctttggaagcaggggacagtattaagtagtgacaaatgactgttttttgtaccataaagcctcagcaggtgatcatggttatagcttccccttcagcttgtttgcctatactttgtctctgatgttggtaacttagggatggtaccgttttctacatttcacagcatgagcagagtgcttttttcctgtttcgtatactgggcatccttcagatattgttggtgatgaatcgttcgttccgtgaattcagccagtctttttcttttcttgaaccattagttcccccaaatcgtacagacccatgtctagttattgtggccatcactcactgtcaccaagtgtgattaggaagaaggttattcaaccctgtcagctccaggtatctacgttaaaaattgggtctacagagatgatgctaatgctgcttagtttgtcgctgttgtgaattataacatgtgactctaatgtgctatgaactactcatggctataggggtcctctgcatacagtcttttatttgagatatgttcagctccttcacctgatcatagtccctcccccctctctcttggatataccaggcttccaaatgcaaaacacacaatggtgaaggcatcgacaattatacttttgtttactgtttggtatctataggatctatttagtttgtggactaaataattattaactagtcccatcggaagtcagcaacacacccatttactgtgtcagccacactcagagaatcagaatcaactggaagaatatccaggattgtttgtggttctttacccttcagtcgtttgtatgaacaattctcagggttgagtatgctttcaaaaacacattcctgtctggacactctattcaaaggaggtagagtgtagctcttcattctttaagtgtggttgcttataatggagtccatgcaaaaagaactgttacaagtggcttaatgacagtgtacctttatagtagagaagcctaaaaatgccattcaggggaagagattaacatcaatagtgccaagccatctttatatgaagtaacaagggcactttatctagcttttcttctaaaatataaccccaacccaatcaagaaaaaaaaatcatacaaaacatcttaatagtcctcaatgctatcaatgtcttttgaaatcgttttttagactgtagcatccaaaaagatctgcagataacagaaccaagttcagtgtgatgcatggcatgggcttctgaagcagaggggaggcaatgagcaacgtcttcatttgttttccattgctacaataaacaccacaaccaaaggcaatcaggaaggaaagggcttatttcagcttacaatttatagcccattatgaagggaaattagagcacaaactcaaggcaggaacctggaggcaggagctgaaggccacaaaggaatactgcttactggcttgttccgcatgacttgctcaacctgcttttttatacaacccagaaccacaagaacaggggtggtacttcccacagttgaggttcactctttacagatgacccttgcttctgtcaagatgacaaaaaataaaaaataaaaaaataaaaaactagcaagcacaggcaagaactaaagaaatgttaataaaagatggtcttaattaataataatgtttcaactttgattcaccagttgtgacaaactatggtgaaaaagtactaaaagatgtcagtaacagtggagactgtgtatagggtagatcggaacgctcttcttcatttttctgtaaatcaaacaagacatagtattctcaactggaaagtttaagaacgttgaggtcaggagatgattagggtgaggggctccggttttgtaatcactaacatgatgtcctgtggactctgaaaaagccaggtcacagggattgagcagaggaactttgtctactgtgaaaattctcatccttggtgatgaattggaatgtaggctctggggtaagtggtctcttttagacaatctagtagtagcctggacagtggaaatttttaaggccttttgtgcagtctagttgtaatcatgtttacaacttaccataccagtgaattctaatagggtgatctatgtaaactgaaatttaattaagattcaatgaaaggagaggcaggagagatgcctcagtggataaaaaccatgctgcacaaacatcaggactgtaattctaatgcccagcacccgcataaaatcctggtgggtatggggtacctagagcaagctggctagtgaggcaagctgagccagtgagctctggattcaagttagagaccctgtctcataatacatgagatcaagggatcgtataatgatgatcaacatgtatgcacaaagacatgcaaatcctacacacatagcaaagcaaagaagaaacgcattaaaaatgtcaactctacacacttgagtggtcactagttgcatgtgactagtggcttttgcatccgcattgctgtttctggacatccccctcactgccagtgagcaccgtgctaagccagctctggattggttcccagtgaggactaaaatgctctcccgttctcaagggtcatacagtaaatcatcactaaatcacattaccaaggtgccatgtgatgtctgtagagcagcaatacaactagagatgactcttgggtgtgtgcttacagcttggatttattttatagtttccctgaactgcaaccaagtggccagatgttactctttccctcatcagtctgtaacttcttgcattcatagctgtcaaccctgacagttatctaagcactctagtgggacttcccttgtatacatacacacactggtccagtgcagtctggaccacggaagagacttgggtcggatataaaatctcaaactcacatagtgagaccattgatcacttgctcataaattgattttcagttacagatcttccttgattgctcagattgcgtgtttttttttattcttcttatttcttcttccttttttttttttttttgatttttgaagacagtgtttctctgtattgctttggaggttgtcctggcactcactctgtagaccaggctggcctcaaactcacactgctctgcctcatgagtactgggactaaaggcgtgttctaccaatacctggctgttttttttttttttttttttaattcttaaacataaaattaaacctgagttctattttattttctctttttttatgtcttaatgttctgattactgacaaatacaaccactataaacaaaaacatgatataaaattatcaaagctattctcttagtattttaagtaatagcaggctcatgcagtgatcaagacaccactcactcatgaaactagccatcatcacagacatccgtgtcagggactaaaatagagaaaatatggaattgctgctttatatgatgccctgcgatgaaaaccattgtattgaccataagtgccccattctgggtcacactatgcattctctatatttgagctgtcagacaattgtattccctagttgacagcaaccagatagaaggtagaagtctctcaagcaacacagagaaatcccaccattatttagcaactgttcagactcttctaagaatcaacagtgcaatttctcaaagacaaatatgcatgaatgcatgagacaccataaatcaaatgcacgagagcaagatggtagcttgagcaagatggttgatgcccttcaccctgggggttttcctaacatgcaaactgcttagaagcactcgtggaatccatcaaaaatatttctatcatgaatggaattagaattttggcttgcaggcaggggtgggggtggggtgggatacagaaatgtcaagtaatttgactctgtccattgaagcccaagagctgatgtctttgaagaaaggcagggtcacctaatctctacttccgtccagtcatgctcacaggcatggagtaagatcaacaggcaacatttcaacatttcaaattccttttacaaatcatctttatgacagggtgacaggtcatctctacagccaaaggatggttcctaaccaacgctgctaagggccagggacaaagcagcaacacatggaatgcacctaatggttaaagcagttagagtgactctgacttctaagttcctctttgggcaacataggctggcccatcctgtctgcatgctccagttccgattttccttaatcttacacacaggctcgatgtgtgactactgtaaaatgatcacacctctccatacttaggagtgactgcggtatcttctgttacaggccacctttgtaagagtgtggctttaaaatcccagctagtcagaggcaggcccttcctgatctcagttccttagcaaatggtccaaaaggccagcttgtcagtggactggcatcttctgaggaatgtgcaagccatgtctgcatctgccccaggacactagcccagtgtctgggcatttcagcagttgttctgagggctcaggacgcttatcccccatcagcagctgtgctgcctcctgtctcaggagcagatcagaggaatgctgtggaagagacccaggcctctggccacccagattagagagttttgtgctgaggtccctatatggttgtgttagagtgaacggccagctccagcctgtctctgctccttgtttgggaagcaagtgggtggggatcagactaaggggctatataacccttcagcattcagctttcctggacaccacccacccagagtgcagaagcccagcccgtcactgtcagggtaagtggcaccagcccaggggtgtgactgggagattccacaggctcttttattgcccagtgtagttagacattgtctgtgggactcgggatgactcccacatcctgcatttttgaatgaaggtttatactattacaatgattgtagctttggagtttgcatgatcttacattcgaattgggctaaaatcaagcttggtttagtggagaaagtgatggagatggactgaaattttgttcacgtatgtcacctgtaaaacctgtccatactgcttggattctgcagcttactataggggtgaagtctagctgcatatggtaaattgtgcatttatttctattttggcattgaaaacttggatttgtctaaggttcatattttgtgtggagacttttcatccgactgtgttttcagtgcagctgaggtacctggaagtggatgtcaggagtgaacccaggcagtttccagccctttggttttggctgaatataggcattgcttccgggtctccctggctctaacagctggtgacccatgttgaaaatgtgtatcttgtgagtgtaccggtgcctgcactgttcagacctgtgtcattgctcatttgcagcatagcatagcttctatacttctgcaaaaaaaggaggaagtgtctcatccaggggaggaccgatttgcatttctccaccttaagtgtcctctgtggagccagccttgccacgccaggctaacccctgtaactcgagccgggtagcttcagcggggaatgcagttttctcaataagattttcctcccgttttgtgattcatgactaaatatggtttgcgttttgagacccacaagctgggaatggtactgtccttccctcctcccctccctacccctccctaacaattcatttttggcaagagatgcactccactgggctgcaccgagctccctgacccgggtgcagttccaaaagcagacgccgaagtcagtgtgttttacctaattaggaaatgctcagcttcacactgagctactcattcaggttagataagagttgtaaaccacagcagcagtccctctggagtcatgcagactccttctctagtgacaacgctccttccagtgtttactaagacagattttctgtacattttttaggcgaaatataaatgcatctttactgaatttgtatagtatttttctgcatgggggggggtaggcagcttttttcctgcatatattaaagcacacccccaaacattctctgaccaatagaaagtttacatggtttattcttccccattttgagagagcttcctaattctaagtgacttatcccatttacaggcctgatgctgagtgtgggaaacaggcttagtgtatgtgcacagattctgatggtcccttgctgctggctgcctttgatagtcactcagaggccgcctgtgtctccttgtagttacaaactatcttctgattcctcatcgtgtactagaaaggaagctaaatataattcagtgtctgaaaggaaagggaaaaaaagaggagagggaagagcaaaccatggacaaatcctgctttccattctagccagggaaatccacacactgacgattacattctaatcctcgggcagcgtggaaggaagccaagagcacaaacaaaacgcctggataatgataatcatcacacagtgatatccatttgcaaagcttggatatccttccaagctttcaaaattccaagcttaaatgttggttacttaaaattttgtttaaaaactgaaggagtatgccctcaatttaatcaggtttggaagatgtgccagaactcaggaaaataaataaaaacttctacaaaacccaatccttaccgcttcaaaagaaccccagtaaataccttggtgagaataagtaatcttcttttttttttcacaaaaaacaaacaaaaaccacattttattgtggtcatattatgttactttccctaacttattagtcttagagaagaaaagctgttagcatactgttgaattttcaaattaacagtgactttgattaatgaaagaatactgtagccccctaaacttcaaaccccttcttggaaaattttaattcatgtttctatattagaccagctattgttggcctcaaatttgtgatccacctgcctcagcctcccaagtgctaggattacacagcattgactcatgtttaatgtctccccaagtatacaaatctttagagccaatagaattctcttttaaacatttaaaatgagcaatattttaacattttcaaattgttgtatgctgcccattcctcaaaatctacctttttggaaaaaaaattaacttatatttataaataatgtgagtttggtttgataaagacaaataaaactaggtagttctttaacacctgctaaagaatgtggcactggggaaatctgttctcatactctggagctggtgtctgtgctgtttgttcactgactacatgctctggccagcttgagagtgttataagagcctgtgacagccacttagtgtctgagggccggtgctgttaacctggaagtcagagttcaagttcatcaatggctttacagtctagtgaaagcatttcaagataaagagtgtgttagttgagatttggggagagcctccacctaaaacaacacaaaagtgctaagaaccctgtctgtgggtgggggtgatggtgagctctggattcctggtacagcaggggctgcatcctccctgtctctgtagaaccccgtgtagctgctccagctatgtgtgaagaagaggacagcaccgccctggtgtgtgacaatggctctgggctctgtaaagctggctttgctggtgatgatgctcccagggctgttttcccatccatcgtgggacgtcccagacatcaggtgagtcaaatttttattaaatacagagagaacaggattataagctagatctcctgtgtctgtgtacatccaacagttatcagatgctttctgcccagagttcacataaccttgtggaaaatttatctgcggtaggctgggatacacccagtggtgcaactctctctctctctctctctctctctctctcccaccccagtgataattgattcccaggagtaaatgtcaatttcacatatcaggcataaagattacctggcaggttatatttttattatatatgttatacacacaatgtatataatatataatgtcagattatatatattgtaaaaatatatcattttctcatgcacgctatctaaatacagtcactatgtgactattgacttcaccgaagtagcagcagcatcagaaatcattataagctgcccttatgtacgtcatcaccactcctgggaaagaaattaaaacaaaactcaacctcacggaggagtttggttttaggtgaaaggaaacactattactaagtgtaactttatatcgtgttagctgttaaagaaatcatcaactcaccagtttcgagaaagcattgacttgtggtatcttgaacccttctagggagtaatggtgggaatgggacagaaagacagctacgtgggcgatgaagcacagagcaaaagaggaatcctgaccttgaagtacccgatagagcacggaatcatcaccaactgggatgacatggaaaaggtactgagactgttctgtgggctgagtctccaggaaacagaattccagtgcctctgagaatcactacatgctactgcatggggctgctgcggaagagagctggcattaattgctcaactgcactgttatttgttatagtttgacttggattgttactgaaaaaaccttgacttacttctctttgaaaatgaattccttggttattggtgtttataaactggtgggaggcagttctgtaggtgagagaagccctttgctaatgtgcgactgactttctttcacacccattgggctaccctctgagtacaggtatctgtagagcattgagtatccagagctagaattctgggaaagacccttagccagcccattcctgaatgacttttgttaattttcctagagcagttttcttaattttcacaaatccacagtggattatgactgacaaaattttttccatctttttttttaattagaaaaaggattgttttacacgacaatcccagttcccttctccctcccatcctcccctaccactgcccccaactaaaaccccatctatcccatatcctttctgctccccttggatggtgaggccttccatagggtgtcatcagagtctatcatatcctttgggatagggcctaggcccacccctgtgtgtcttggctcagggagtatccctctatgtggattgggctcccaaagtccgcacctatgctagggaggtcccatagatttccaaggtctcctcactgaaacccatgttcctggggtctggatcagtcccatgctggtttcccagctatcagtctggggaaccaagagttccgcattgttcgggtcagctgtttctgtgggtttcaccagcctgggactgacaaaaattttaaatgaatactttaaaattctctctgtgtgtcatgttgagtaagacctttgcttccagaccattgtgaaagatccagcagaaagcagagttaaacccaagagttataaagattgttattaggcattttagaaacactagcaacaaaaaaacatgcaaaaggaagaataagaacggggtgtaattttttaaagcgcagaacacactaaaaccgcagcatctgtttttattaacctatttattagcttttatccccccaaacacatctattcacccacacatgctcacgtgtatcatttaaaaataaaccctacacatcatgctcccacagtgcattgctaattatgtgtacaccttcttttctttgaaaaggtggcccatccttagctttagttaatctccttgcggacttggtgcaattgcagtttggatcatgcaggtggcagcaacaccaatgggaaagggtccttcaggagtctcttcatggagccaagagcatgcatgatctgggaaagagaatactggaatggagaaaaaccctgcatccctggcatttaaattcagagcatattctggagacagggagcgaaggatcagtttttttttttaaacctgttttagccacagtatgtaatagatgactagggttcttgagcactctgcatttttctctccattttatatagcagtatgtctgttagctctttggtgaaataaggtgaagggattaaggaatcgttgctcactgatctttactgtactgaagaattatgaaaatggttttccaaactgctcagccctgccctttcttcctttcactaccccaccccacccctccaagaaacaggacttgccagtttccctttcttggatggaaaccaccaaaaccaaaaccaggaaactggaatcgtgacagagtctttaaagttggttttacttttgttggtttgcaaactgttatcggccatgcttgtttactcctgggtaaatctcatatcctaatgctggtggacaagaagccttccttaaaaggtgccccacagtgtgtccctctttctcttgctctccagatctggcaccactccttctataatgagcttcgtgtggcccctgaagagcaccccaccctgctgacagaggcccctctgaaccccaaggccaaccgggagaaaatgacccaggtaaacatttgctccaggatgcaacactgttggattgggagtaaggctaactaaagtaagactacagcttggcaaacagaaggccctaactggcagttcaccaacagactgaccacctggaaccccacagatcatgacagtgctcacatccttacattaaaaactagaccattttgcctcaaagggcaagagaaaaaattaaggtttaattaagaagggaacatatttagggttagaaactgccaataagtcatttcaaaatacagtataatatagaaattatattataggaactgaatttgtcactgaaagccacgtaatttctgagatccccagcatatttgtttgttggggacattaatactattatttttcaagaatagacatgcagactgaggcagaaatgatgcatgagccccatggtgtgtggcacaataaacatccaacaagtagtagcaattactgtcactattgtctgtgtgacatttaataccctacagcaagagaccatgcagtgaactagtatctcatgtcaattctacacaggccctggtcaagcacagggtgtttcaagtgaactctaactcctaatgctgtgaagcaggcactgtcatcccagtgacttcagcgacagaattaatcctcaggtgcactcagtgattttcctaaagtcacgatgttaggagtggcggtgcctggagctaacccatggcttttccgctgaagaatcataaacacccagggcctcctcctgggaagagcacttcatgtgcacaccagcacatcggctgctctgggaatcactctacctcggaagaagtgatagttccggtagcaattaccatcctatgaattgtgttgaggcagagaagtgactgaaaactatgatttctagcaagcatccgacatcccttcaggtttatgcactagagagtgttactaacatgggggctggtgacatcttctgatgtagaaggagcctagggggttctagctttaaccttgtccccgaactgcatggactaatggattgcatttacatggaatcttctattccatcatataggtcctatatagcgtctccccctctaaaaatgggggcctgataccagggctggcattgacccacaattgcataaaaatatgggaaagattaaactgaacctgagacagatcacacagccagggttattcccagccagtctaatctttgggctttcctttttgtcccttggatattatcttgtctttgtctttgatatagttaataactcttagcctctgagagttcacttagtccaaaaccctgctccctttatgtttgagaaataaggaaagaacgaacaccatagtgaatcctgtcacatccaagactagagctagctgctagccactccttgccttgccaggtcttgtgttcacaccgctggctcctttaatcccgtcaggtcacctgtgtgatggtctgtctattgccaccttcatttttctttttcatggaaccaggtctgccttggccctccttcttttgttctacatgtctggaggatttgcatcaggcaagggggtgtgctctttgtgagactgatagcatcatctacttaacccttcaattcctttgcagattatgtttgaaaccttcaacgtgcctgccatgtatgtggccattcaggctgtgctgtccctctatgcctctggacgtacaactggtaggtcgtcaagggaatgggaatcttagtcaaaagaatccacaagaaaaagtaagatttgatggctacaacctctggcttgtgacaaataagaagcaaattagaataggcagagatggtcccaccctaaaacaaaaacaaaaaccttgctttttttcaaaatcagccctggaccccacttcttcagcatgacattttcaatactttcactcttcctcttcccgtctcccccaagcactacctcactgttcccccattcccctgcatcaaatacattctttcttcctttcctgtaagaggcttaggaatttctgatcccacagtcttcagcatactagaacagcaagtcactgcataccagctgctgtggtaactaatagcatgctcaattgtcccctaggtattgtgctggactctggagatggtgtaactcacaatgtccccatctatgagggatatgccctgccccatgccatcatgcgtctggacttggctggccgagatctcaccgactacctcatgaagatcctgactgaacgtggctattccttcgtgactactggtaaggcccaggagaggtcaaagggaaaggatggaagacagcacgcggttcacagttacttagtgggaggagtgctgtcattcaaaaggggccatggtactacaggaatagctcagctggtaaaaccattgcggtgcaagcatgacaacctgatgtcaattcctgaagccacagtgaaaggagagagctgactgacaacttaccttctgccatacacacatgtgtgcttaagtgaacccataggtacacacacacacatacacacacgcacacaataataataataataataataataataataataattttaaaaataaaaataagctattaaaagagttggtgagttcatgacttaaccatcagtaaaacctgtctccaaagcacagaacaaagcatagtgttccttgctttgtgattgtaaagttagaacagttacttttagagtagctgaagacatcgctgtagtaggcaagtcagagtgaacattcattttttatgtatgctgttacacacaaaatccagggtcttgcatttgctagccaatcactctaccactgagatacacccccagagctacttggattattttttaggctccatgtttgaaccccaacaaacagtacaatcttcttttccaatatgatgttatattaattctatttttgcaccccaaaacaccacccaaagagtcccaggaatcaggtgaaattagggcgttggaatcttaaggcacaggagtctgaggagcaggcagccaccttttccatgtttctctccacatggaccaccggaaatggagctggcctgagctagcatctgcttcattttgaaaagtaaagaacctatcaaagatcaagccactatgcatctgggcagggaagcaaagatctttgaggcagtttgaaaactctgagacttctgaggagctggttcagcagaagagtgacatggggtgggggttgactttagcccctgtgcaaaccctaatgtgtacctcatttgtatgtgtttgacagctgagcgtgagattgtccgagacatcaaggagaagctgtgctacgtagctctggactttgaaaatgagatggccactgccgcctcctcgtcttccctggagaagagctatgaactgcctgacgggcaggtcatcaccattgggaatgaacgcttccgctgccccgagaccctcttccaaccatctttcattggtaggcactggggagtggagtgtccctgttctgtgcccagcaagccctggctaccagtagccttttacagaagaagtgaatcagggcttcagaaagggcacttccacagtaggaaatgtatcacagtttcaaaatgagaagaactcagggagccaagaaaggacttgactgcctaagaaatctcttaagtcgtggtcaagacaaacatgttctcagcatatattgtaaaagacaagcgttatctatgtttaggatatagcagagcacagggatgattggggaggaggagctgagtgctgagaatttgggaatgctggggatgggattcagaacaactagaggggaccctaaccctaaccctaacccgtattccacactggcaggacagagtcacagagggttttgcagaggcatcctctttggaggctgggggcctggacttgagattttgttctattttcactattttgagaatgtcacttaacctttctgaaactcagtttcctcctgctaggaaagctggaagatttatagcagagttgtgtagcacctgcatcccacaattctctgtcagtagtgttcctaagaagggtgagggagccacctagaggtttactacaaaaaaaaaaaaaaaaaaaaaaaaaaacatctgcatcgaagtcaacaagaaaatcagcccctctcccccccaaatgtctgtactgagactgcatgaaaaacatctttggtagctgggcatggtagtacatgcccttagtcccagttctatagagaggcaaaattaataggatctttatgggtttgaggccagcttgttgtatagcaagttccaggccagctaaggatgcataagaagacccctgttctaaaaaagcatagcacaaatccaaaaccaaaaccaaaccaaaccaaaccaaaactttatctaagtacttgagacacttttctgatgaccccaccattccacctcgggtgttagaggtgcaaaataaaagaacagcctgggagagatgggggtgttctgatcaacggctctagccctccctttttatggagcatctgaaggtgtagctgcttgttcaaactatatatagcagaatgtctattgagacattgatgttagggcattgtgctgcactgagcctccccattagataagaggcaggagggcatggagcataacaaggccctttggtctcttggatggtagtttctttcctgaagcctactggcctcacccaggaaaagattagtccgtattcaacccaagtttttcccagtgcacaagggccatggcctgtgtctcatttccagggatggagtcggctggtatccatgaaaccacctataacagcatcatgaagtgtgatattgacatcaggaaggacctctatgctaacaacgtcctctcagggggcaccaccatgtacccaggcattgctgaccggatgcagaaggaaatcacagctcttgcgcccagcaccatgaagatcaaggtaccatattaagaccctctgactcacaaagcagggggaggaacagttctagagtggccaccagcatgtgagtcagcctagcaagttctttgtcgttgccataggaaatgaggctaaggtgagagtgatttagacttaaacacttaccccttaaaacaggatctgagaaagccagtctggaggactgcatggcgaatggggagtcactgcttctgggagggcttgtgctccattgattcctgtctgaccagctagaatccccctccctctgatggctgagctcactgcagaaacaacttaattggagtttgagaacaggcaggcctcatgaaacaggacttagacaaccctcaattctccaaacttgacttcttaaatggaaatggatgtgacacttgggggcccagtgtggtccgagagcacatcatcttggggacgccaagatgatgagttcacggaatgagcctgagtgatgtcaggaaggccctgcaccatctgtgtaactttctggaaatctaaaattatggccaaacccccttatcatgggaaataaaaaaatgtgtagcttcaaaacaaaattcctgtgggggccaattttaaaattaaacatgacactgacagagccacttttgaccattattgacagtcctctgagcctatctctgtatgtaacatgagaatcattggatacctgcccttcgaaattgttataggaatcaaataagcgaatacctgtaaaacagcaatggtcgacacagtgagagctccctgaatgagaaaatattgaatgttggaccagggcttgagggcagacagaaagaaaacccgtgcccagcatttcaggacactttgctcactagtgtgtccactgcaagcccagcaagtaagaccagagtacaatgcggtgttgctcagctcagtctcagtttgctgtggcatatcacaccctggcctgattctctgcactctgtcgaagctaaacactgaacaaaacaaaaaaaacaaaacaacaaaaaagcaagcatgtcgtttccactctgaataaagccagcccctgaaggggaacactcaggtccgggacccggagccctgtgtcagggcatttggctgggatttcagaaagcagtggccagtttaatcaggtgaaagagcacttgcttggcaagttctggagcaattacaatgtccctgcacatactaggacttctacggaaagtgcaggtcctgctgagctcttaggcacagctcctgcaatctctcctggagacattgtcagggcttttatgctgagcccctatgcaatccaaggccagtttgggtttacccaataaagggatggaggaattagggatgatttggcatagactgcatgaaaacaaacaaacaaacaaacaaacaaacaaacaaagacacaaaaaaacagaaaagtcaatgggttcactggggaatctataccctggcttgagaagactgtccttgttttccaggaagggccaacaggaggcacttcctcttggcactaatgctgctttccttttcttatcctgacagatcattgcccccccagagcgcaaatactctgtctggattggaggctccatcctggcgtctctatctaccttccagcagatgtggatcagcaagcaggaatacgatgaagctggtccctccatcgtccaccgcaaatgcttctaagtcacctccctgctctgtctccagcacacgactgtgaatgttttgtggttcagcgccttcagttcctttctaaatcattcctacccaaagctttgacttgttacctgttttttttttcttttttaataaatcagacctgtgctacccttcatttctagccctggcctatcatcaacactgaagtgatcatttctgtcagatgggactcatttatatggggtatatggggtggctccctctagtggtcaagaaaggatgtgacacattagaatgactagttcccaggcaatggataaaaatcacttcaacaggggaagccccacttaaatgatgcaggatgcatttaagagtgcaagagatgtgtgtatattacatgtaataacatatattagtgccaatatgaaaaatctacactgactttatgactggttgagtgactatattactttatacatataatggtagcctgataggtaaaaacaaaaccagttttacatgtatttaaaatttggcaagcaatacagttttctaaaattatatcttttgtattaaagcatacacctatgcatgaatatgcatgcgtgccttttatttgccaccaagccttgtatattatttgactttaatgtacttcaaaccttgtatatttaagaaggggtaaatttttgtttgtttttttaaaaagaacattctttataagactctgagaagctttttagctttaatagcctcataatgcacccggatcatattttcctcttcctttgaccatcatctgtctctgtaaaaatgcagtggatgtatttacactaaagggaaggaagagacagcaatactttccaaggaccagccatgtcacttataacacataaggtgttcacatgtcaccactattttttctttaaaaccgtgtgcagatagtgttatcatcagtcatcaggtgaggagaccaagggtgtctacatacagacatatgcagttactgacagggggagctacccatttcaacagctccttttctgtcagcttgggaaaaacaaagattcttttgaaaataaaaaaaccaaaaaccaaaaaccaaaaaccaaaaaccaaaaaacagacacattgggctgaagagttgcctctgtggttaagaacacttgttggtcttgcagggaaccctgggctcaattctgtcacccacatagtagcttccaaccagctggctgtgactcaagtcccaaaggatccaaagccctcttctgacctctgttggcaccaggcatacacatggtactcatacatatatgtgggcaaaaaatccaagcgtataaaaataaaataaatctaaatagaagtttacaaatagatatattactttttgcagcacaatttatttctgaggatattatttgggtacatcaataggcataggctgaacagcatgtgacctcctttgagacacagcaacccaaaaatgaaacttcaaaatatgcaagaacaataaatatcaaagttttggtctaaaatatataaatataaaatatcagtcacttctggaaacatcataagaaattcagcagacacacatatccacggcaggtatctggggtagatgttcttgtatttggagcatgtcacctcagatccaacagaattgtttttatgtcttttactaacacatggctgcatacctagaaaagaaaaaacaatgttgcataataacatttaatctgtggttttctttaggatatatatacatacatacatacatacatacatatatttccttacttatttttttctcaattttataaatattgctgaattggggtagggtaaacacaacataaacatctgtgagaataatccatgctgtctattcacactgaacatctgtaagccaggcattgtggtacacatcttcaatcacagctctcaggaggcggagacagatggatgtctctgagtttgagggcagcctggtctgtatagtgagtaccaaggctacacagaaagtccctgcctcaataataatcatcatcataacagcaacaataataataatcatccatgatgtctactcacactgaacagcctggggtccttggtgtgaggatgaaagcccttctttttacaagtgcaaacctcaagcatgccagcattggtgagcctgaaaatgccagtgctaaatatgagggtgaagagaagtgcaaagttaaagaccatctgggaagacatacactgtggtgataatttgtttgtaatctaacaaataaagtaagcatgaagatcagaaagcaaagccagccacagccatagaggtcaggcagtgatgggacacacctttaatcccagcacttgggagacagaggcaatggatctctgctagttcaaggccaccctgggttacatgaaattgatccagtctaaaagagaaacagagctcacacaaaggtgatctcagcacttgggatcccacgcctttaatcccagcactagagaggaatataaggtgggaggagacaggagctcagtgcagcccgaggagcagtgtagtctggaggtgcaagctgaggttcagtggtagaggtaagaactctctagtggctggctgctctgcttctttaatcttcaggtaagctttatttgttagatcataaacaacttatcaccgcaataaacacacacattcctcacatggtatggaggaagaaaccacaagccaggaattcccagtgacttttacaactagcctcaccatgactaccattagatacatggatctccaagtacctacaggacccaaaagggacaggtagctgccctgttgagaccccacaggaaaggtcatacacatgctctccaccccagcagacagttgcaggttctttatgtcaatgatcaggcaggtggcagtgttgggcactgtgataaacacatcatagaaactctcatctctagtgtccttcacatccatccaagacaggcaaggatgaaggatgaagaagccaggatcactgtgctcaggtatccacagcctgcaggcttcaaacaatgtctttctgatccttataaccacttgtaaactgaagtctccagaaaatgaaaagccattcctgtgtctaaagatctataatacaaggccagatgactgacattctcggtgtggagggttagaatattgcagacaagtgccaaattctctagagctgtgttcagtttccttcaaaactattcactgcccacctttgtgtgatgactatcacggttttagaaaacactcataacagaccttttattgatcccaaagctacaaaagccatcagacaacatctgatccctacagctcagcttcccccatccccgctttgctgtaaccattctacatgctgtctctgccaatgtatttggtaaatgtcttgacttataactccctttggtctgtaaaaaagaaaatctagaaccgcttccactgtggagtatgtttttcagggcaactagaatccatgtttctgggccgtggccacttacatctggctcaaacgtaaagtcattctttccaagatgagaatgacaatctgttgtagggagacaccgtaacataaccatgcctcgtaagggctggctacaggtgtgcctgaccacgcctgtcagggcgtggtcaaggtgaggtcaggatgatgcaggatgggctcttaaggaactgtgagcacatggaagccccttctcctgccccttctctctggcctggctgcttggctgcccctggtacgctctggcttgcgtttggctggcatttatctcaataaagatatctagaccttacggattacagatcgtctcttggctcacacaataatctgtgtaaacatttttgtattcccaaactaggaaagcttcacaggcaactgagcaaggctagtgaatttctttcattgaacacagaacagtagaaaggatttcaaatcaactgtgatggtgaccctatcacatgttattgtaagaacagaaggggaactagcaggctcatctttgaaaggacttaaaacaacaacaacagattatggagctacaaagtaccatggcatggtggactctggagccctcttgtcacacttactctttatgctttggggaacacacaatggcaatagcctccggcaacataagctgataggaacagtgagtgtgaagatccacactggacagaaacgcagtttgtgtcgggtgtgtctacaaatgggaaagaaaaaacggtcttgttagggaagcccattagggaagttcacttaaaacttgtcctgtaattttcactaagcaaatacacatgaaaaagatgttttggagagggctggtgagacagctcagtgggaaaagtgcttggtaagcaagcccgatgacctggatttgatctcgggaactcatggtgggaggagagaattgactccctgaagtagatactctgacttccacatgtgtgccatggcaccggcacacctgtgcttgcaaacatcacactaccactactacaaataataataataataataataataataataataataatgtataaataaaaattaattaggtggggctgatagaattcttccttccatttctaccattgcttgcttgtttggaataacgatgacttagagccaaaattcctacgagtgtttgtgctctccttgtgggaaagagtgagatggcttcacttgccaaaggcttgaaatagatgttccattaatctaacgaggtaacaatctgactatcgcagtctacatacaaggatctccagactcagaaagatgaaataacatggccacagagatcagaaacctggagtcttggacacctttgtgttcttccagaagtaaatatagcacatgaatgagagtgtctatggctctccatccttacaaacaggagtagggaagtctccaagttgctgaaggtgtttgagacccatcaaatactgaaaacacaaaggagaatatgaaccaaatcctgtccacactcaacactcaccctgccacaaagccactgacccagtactctcattgttaaaacgccaagatttggtagaggaatgagtaagagggtttgacacctttcctatgccagagaataccttctttgagtaaaacagagccatccatgtcatggcagcatgggagacgtgttctcttagaatcactgtgctatggaggcagcaagcagcttgtccatagaaaagctactatgcccatcaatttctatctcaaaaaactgcttctgtgctcaggaggacatctctcccatgggagcatggtactcccactgcaaaggaaaccgatgatggtggtggtgatagtgacagcaatagcagcaaatgccatttattaaaaaggaatgaagagctaggctaaaaaggaatcgctttccatgaattatgacatagagttctcactaaggtctgttgttattatccctttctatagacacggagatatttaagatgaacagtacagtatcttctagaagtcaaaagaaccaggcaagctaagacatttaaaattcaactccaggtctgccagatccattcagacatccttcctgaccacaagtttatagagaagatctagccctgggattggctgctgttattgtgttctgtaaaaactagcatgacttcaccaagctttagaaaatgtaactaacagttgtgtattttcattcaatcacaacagctggattcagtaaaatcaatttaaatcttggaagtctagattgatgacaaatcaatttttaaaaagatttacttatttattatgtatacagtgttctggcatgtagatggttgtgagccatcacgtggttgctggggatatgaactcaggacctctgtcagagcagccagtgctcttaacctctgagccatctgtccagccccaacaaatccattacttaaacagcttaaattcactacagcatatagcagacacagcacatcttaggaaaacttttgattatagtttgggaattgttcaaaatgaaaaccgactggcctgcatatgcaattttaaaaactactacttttaattgttataatttccctgctacagcttatgtatacacgtgcatgcatgttatgtgtgtgatagtggtgtatgtacatgtttatgtgtgcacatgtatacagaggtcaaaggacggcatcaagtgtatttttattgctctctaccttatttagggggctcagttttcccattgaatgtggagctcactaacttgcttaggttgtctagctgacagtagccagcaatctccctgtctctaactgtccccccagttttgggatgtcaggctcttgtggcagcagccagatcattaggtaggcactgtggttctgaactcaggtcctcatttttgcatggcaactacttgtgccaacggacccatctccacaggtctctgtgctatagtttatttgctttaaaatgcaatctagataacttctgttcagctaaataaagactttaaagcagcaatttccatccagtagtaaggcatatgatttattgttaaataagccaaatagatgagtataaagcatttttttttcaaatttattttcacatttgaggggcagtttatgcttttcaaagggctttcatattccatcttgttttctgatcacatcgaatcagtgagggaacttagcttcactgagtcaatgaaaaaaccttgaaaataaggagctcatcaacctaagaggatagagggactcaaaggctgagtgggattgatatctcctccactcttctaaattctatcccaataacattttgaaagtgtgtgtatgtgcacaccattcctccccagcacttttgtacatacaaacaaaatgcaaacctacccctgctcattctttaggcgtattgcaggcacccactgtgccttgaaacttttggcctacatcccattctagtgagatggcctctccctgtccgctctcattagaatgatgttccttgggtatattctgtaggggaacctaatcaaagagagagtgagaggtgtggccttcaggaggtgactaatagcaccccccccccccccccgccccggagtgagggctccaggatgaagggattattctcttcctccttccaccatgaaaggatagagcaacaaggtatggttgctttggaaacagaaaacagttcctagaactataagaatgaaacctctctttttttataagttgtctagtctcagatattttactatagatgcataaacagacaaacacagtggtccagactgagttgtatacagctaaattgaaagaaaaatcccttagattacttgaaatagaccaccttcatcaattacaagtcatggtttttctgagccactagaagatactaagaaactcactggcatgatttcatttaacattcagtatcatatgaagtcaactgttatggttcccactttgtggatcatgaagctgctgtcacagttaacctcacttgccaatgctcctatcatgaactcatagcagagctgacatttattaaacaaatgtctatttgatgaataagcccagtttcacacctacagtggtataagagatgctagaacccaatattctgtccctagtcatttgttcaactccccagccattttatatgcacacttttgctctgtgggcagggcactgagtgtgtgaactccctgtggtacatataaaacattgtttaaaaaaaagtgtcatcaggacagcaaaggaaaggagactattacacagttaagaacctggctaagtctctgttatgttatctgaacccttcagagaaaggcctactgtcatgtgctacctttcttaactctgggtgaaacagaaaagtataggatacccctttctaatccagacatgactgacttatacatagactggcattgaacaaacaactgctttaatatcatgacacttgttatctccgggaaaaatgtaaaaacaagaaactacttaaattcagctaaattcttgtatgaaggaaacaacacaacacacaaaaataggccagaactccaaccccaaacatacatgaatccaaccgagcgtgaggagaccatgttgatcctgaacactgaataattcctctacattctccacgtcgcaatagtctgggccggcagactgctttggcacgatcacatgggtaatagtgaattcattatgtgtctagaaaacaattatccaagaacagaaacaggtttgaatgggatgtgggatgctttgttatcggctagcagacctcaccacctgtaccacccctctcactttgacagtataacaattcaaaaacaaacagaaaagttgactctactgaaagtttcaggcatcagtcatttggggcttgaaacccacttctgtggtaggaaatacaaatggaattagcaccaaggagagcaaaggagaaggaagtttagtttatgaataatgctttggcatattacacctacaaaggaaaatgtcttcacacagcaacacctgcttctgagggcgggggggggggtaaggactaatttgacaaatgaatgtatggtgttattaaaaggaacttctctaagttgtaggggttgatgtcttgtttttattaattatatgcaattatgactttcctaagagtcaccatgttttcctaaattaaaataatatggctcttatgattaagtaaaaagaaagaagaaacatagctctccttggggaaaaggcatggatggaacagaaagggtcttgaagtaaagatgggggttttaggacagtgggctgtgaggtgatgttatctccaggcccactggcctccccatctttctacagcccactctctctccagcctcagggcttacccactgagcactattccttgcatctttatttgtaacctaccatttttctaaatgttttgtttacaatgttttatgatgtttctgaaattttagagttcatttttcttggaatgctgaattcataaacaatgatagtagtttaaagaagttcatatgtataaggttaatttcctaatacttacagcccctccccaacatgcttccacctgctctccttatcacagggaggccagtgctactgagagcaacctgttgagggatgaaacgagaccataccagtttgccacagaggatcccacaggtttctattcctctcactgtgttagactcagcaagcagcagaaatttatggcaaagatctcttgacaaaaccacacacctcaatccttcaaccactaaatctaagacagagaaaggggaaacataataaaaaaacaaatcttgggtcttgtccttcagaactgaatttcggtgagcaactaaagtataaatttcaacattattaggtgtttcactttccacagttcattaaaaaagaaaaaaaatctcttgaaagtagatattgattagaaagagggtaaactgaaatggacatttcgcatgcaaactattttataagaaagtttataaagagtcagcacttttacacagtagccctctggaacacctcttgcacacgtgtgttttctttctgcacactgcaaacgtgccaatgaaccctcaggccacagttcacatattgtaagacacaggttgaatatctcttattgggtttgttatgtgctacttctagcccagtgaatgtgggagatcagtaaacaaaagcatgtttttcagaaacaattaccagtgaagtcccacgcacaatggctgcctaccatgactcttcaacaggtgcctctgccaaagagaactgcctactcgatttgggaaacttcctagagatgacgactgacagcacttaactaacaccactaactggtgtggaaacccacatggctcacgggttgtctgttgatgagactgacaccccaatcagcccatgctcatgctaaacactgcacttaagtatctgactcttgggccagggtctcagcaattaacttctcagtatcttctttgtggagtcaccagtgtgtcttgagcaaaacacatagtggaaaacaagcgtgtagacttctcattcacaatctctattcagtatcaaaatatgactgcgctatagtcagacgagttaggtgggttggattttgaagttagatatagttaaagacaacacagccttcgtcctacgtcacttactctgaacagcactcagagtggccgctggctttaaggccctgttcacgggaggagaatggtcagccaaatcgcttccatcacttttaggaggctgatcagcaaatacattttgcagagagttgttctggtgggtggaaaagcaggacagactgcttccgtccgtctgctcagacagcactgcggagtcttgacctcgcatctggccccgggccaactcctgcttcttgagttgatcttcaaaaaacaggaactgttcggattctagttgctgctggcgcatctgagctatccgcttgcgctctgcctctatcagtctctggtgttccaactttttgagaatttcagctttatatttgttctgaggagatggttgtcagaagaaagtgttagtttccaagccaaaaacatgaactgaaattagattcttattctctctctctctctctctctctctctctctctctctctctctctttctctgtgtgtgtgtgtgtgtgtgagagagagagagagcgaaagagagagagagagattcattgtaaaacaaaaaataaataaacaccacagcaaaaactctgaatttgataaaaaagcagcttctaagcacatattttattggaggaagcacagaaattacgctctacatttccttatggttctaaactctgtaatatcaatatcttgtccccttgaccctctaatgggttgaaacaatgtatctcatcccttaaacagcactgcccaatctagtagccacttgaaagtcccagctgtttaaattcaaactaactgagatgaaataaaactagcaatgcagttctcaggccactagtcacatcctaagtgcccagcagtctcctgtgctggtggttgctgtactagaaatgacaattggagcaagtctaatgttatacattcttttccttgggctccctagggcctctgagtactggtagaatgcgtcttcaaggcatgctttatggagaaagggaatcacagaggagtggttccccaaagtgtttcccatttcttctatcagcatttctacttcttctaaccaaatgtcctgttaaaaattaagaatcccaacacctagccctaacgaaatatctgggcattattaggatagagctagtaagttccccaactgacgctgaaagaaacagtggtgagctactgaaaggtgggggggggcacaggggactcagtttacagcaatgcacatacacacacacacacacacacacacacacacacacacacacacacacacacacacacacaggaatccttgttagcattaggaattctgatttggcttgtattctacatttctaaccatcagggggaagctggtacaggccaaggtcagagcttgcaatttggtttaatcctctcccttagccttgactactgccactcaacctctccagaaatttgcacatgggatacaactgtgggctgtggggtacgactgtgtgaggccgctggtgttaccatagcagaacatggtacagatgtctgatatgctcctcccagggagaccccaccggagcaccgtccacactccctctgcattttaaccaaaacacctcactccagccagccttccagctatgacccagaagctccaggcctgttagcggagatagtgtgattgaagtgaagtgagaggtggtgaagccagcaacctccaaaaaaaatgggcacccaaccccaaagaagcaaagcaacacttctaataaccttgtaagaatttgcacacggaatctgaggaccccatagatttactgggtaacttccactttgaccacccttcagtctcctttcactatgtttcaccatccagaaactggcatctgttgtaactgtgatcatgtttcacccacactgttagctgttctgtcttgatgaaatgttgactgtactatttaagaactaatttcacatttccaaggcctatgtaattaaagacatcaaaaaccatgctctgtttctttctactttcagctgcttctgttcatctggaaaaaaaaatggatcagccatctggctcaaggttacactggcaccagtcggtcagaagcaccatttaaatcactgtgggaaatgtatttcctaatgcattgtcctgttagatgttttaggaaatggaaataccacatccttggtgcacaggcttcatctgggcatccacatgaatcttttattagtttcacatcagtgcatctttcatttttaattgtatatatttcaaaacctcagacagaaatgaaattcaaaaaccctttccacaaaagcaagaagagtgaagaaataaatgtgcccattgaacttacttcgctttgcaaatactcttggtattctgtgttatatttccttaacaagtcctttttcagttcatctgtccttggaaatgcagtctccttcagtttctttcaaaaatacatacacatatcagttagtgggatttctcagtacattcttttagagcatcagctgaggaaaaagcagctgggatgtgtattagaagtcaagttctaagaagcaaagataaccttggaaaaataaatctactctaggattccaaaatacagctttttgcaatgaagaaaataaactctctctctctctctctctctctctctctctctctctctctctctctctctctctctctctttctctctctctctccctcccccctctctctcttgtgtgtgtgtgtgtgtgtgtgtgtgtgtgtgtgtgtgtgtgtgtgtccctttgtaagatcttgattgatcccactagttagataagcattttgtttaggcaggtatcaatagaatttgccatcgtgtttgggaacagttactattggcattacaagaagacgaaagggtatatagtgcgtttggattcctacacatcagatgtaaaaggcagctaaggattttttaacaattcatattccagggttaatcccagatctactggcttcgcatctctagggagatggttcttattgacaggaaaacctagggaacaggatagagtccaactgcaccctcccttgtggaggaaaggaagcaaaagcctaatgagattagtttgtacaagtagttggtagctcagttaggacaaggatccaagcctcttgcctctagctaaactctcccaccaaaatttcttcctaggaggttacctaagaaacctgcatttcagtgtttttattactatgtgaaaattatagtctacacttacatcaactaaggcagtcacaatgtcactaggcaaccgaagttaatggaaccactgtcatctatagggttcaggggctgagacatcatcatgcacacagcacatgactgtagctaaaacttggggctacctcaaaatcacccctgattttcacatagttattccatcctgggggaataataggtataaaggagaagtgtccgcttcaggtaaatacatggaacaaccattctctcaatccctgggaggacttgtaaagaattccttcttaacattgtaaattaatggcgcacactctcctgtctctcttctttttcccaatgtaagttagacaccttggataaccacagtcataaccattaaacgtgttaggaggaaatcaagatgtcatggctgatgacatggggttcttgtgctttagctctcccgaggacaagacaaggagctgtgagccagtatcatacactgaagggcatttgatcccacggtggagggtcaaaccagagtaccttcatgatatcctgcttctccggtacttcacattgctgataatctcgatggctgggaagtttttctacaaacaatctggagaaagagaaaacaggcattagcattctgtgacagcaaaaagccagtgatagtttctaaggagcattctttaaaaaaaaaaaaaaaatccattcaactttttacataactatggtcttaccatgcaccttttcttttcttttttttttgggggggggggttcgagacagggtttctctgtggctttggaggctgtcctgggacaaactcttgtagaccaggctggtctcgaactcacagtgatccaccttgcctctgcctcccgagtgctgggattaaaggcgtgcgccaccaatgcccgactccatccaccttttcaataaaggtcaatatatatgtgtgtgtgtgtgtgtgtgtgtgtgtgtgtgtgtgtgtgtgtgtgtgtgtctgattctatgaactattgaaaatataattcagaaaccaaaacttttacagcattttcgccataaactgtggcagacaaccctgagtttcataattattgctcaacttcctgataactattgatttttcccagctaggttaaaggcagttgcaaattctttaaatttccatgttaggtttcgagcttattaacttggaaattaaatgtgattttttttgcctttgttcttggtggaatcattaaaaagagtttttttgttttgttttttgttttttagtattttattgtttcaacttgaatgttttcagaataacagcccccaactgaactactggtattataagtaaacaaaatacagaatacaagtatttcatgatctcacttacattaaggagttttaaaactcatagtggtatgcacttgtaatctttaagacttgggaagtagaggaagaagaacaagaatttaacttcatccttctctaggtatctggtgtctttcagtgaatctgggctacatgaaacccttactccaaatgaggtggtagggagtaatggcacatgaggctgttttctgaacttatgctggggcatgtacaacacacctgcgttcatgtatgcaaatgcacacatatgcatgagcacatgtgcacacacacacacacacacacacacacacacacacacacacactttttaaaacattaaagggtgcaaaattgtagttagatgagaggaataagtttagagagctggtgtacaacatggtatctataaatagtgaactatattctagaaagttcccaagacaatggattcttaaacattcgcgctatagaaaatggcaagtatgtgatgcataataaatgaatttgcttaatttagccattgaaaaaatatgtaggcaaataaaaacatcgtaaatatacacaaatatttttcaataaaaaacaaattaatgaaattaacatgtagccttaaactaaaacaataaaaggcttagcttagattccatcattatagttaagaaaggatcttctagcagtgaaattaccaaacttgtaaggggaagtccagaaatactttcactaactgttaaagttaggatatattactaaaaacatctgactgggaatgcggtgtcttctgatggatgctgtggtgtagtcacttttgctcaatattttgaaatctcttttgtataataaattcttgcataaacaagcaaatgccttctcaaaaccagctgccaattctatgtgaaatggactactgtaccctcttcagaaatgacatctctcctgtgctccccatggcatcccactctctacccttcaagacaaaattttaaaatatcgatggcagactttccatgctttagaggaagtaatacagccccccaccccaccctgctcccagaaatctgatgttcctatgggaggaaaatgcctgaaaagtgaaactacagttatgaagaaaggctggctgttgagagcctcaagccctctgaccttcttctcattcctgaggctcatggagaatatctcagtgtttttcaatgcatagcaacatagatatatccagtttttggaaatggttaaacgggtctgaagatgaacactctcacggtatccaaactgccatgtcaaaatatcacataaatagtgttttcaatgttctcattctaaagacctgtaaaacaagacttacgttataaatttgttatagagaacaaaggcattttccaggtttccttcttccaaatacacagacgccatcctttccatttccactccggacctgaagtaacggcgtggggtgatgtcttcattaatggagatgttacaaccaagcttgcttagggcacggacccgctcctctggacttagagacacatctgtatgatcaggcatagcagctaactttttctgcaatgcaacatttaaatatctgattatagttttaaaattacaacgacagttaaatttaattcatgccatttatgtaccacaaagccactactaatacctcagaaaagccttctacaagagttaatgataggaccaatgtaacatctctgtgcatacgcacacccaagaacacacccaggaaaaagtaaacacttttattggtataagaacacttcattggtttcaaagtgcatttatgtggcatttcctgggtatgcaagtgttttaggtaaagcatcatgtaagctgtggatattaaccattctgtcacaggagggctcatgtcattggactctgaggttctccagaaagttgcttgtattaaagttactgttaggatttggttctatcccacaatatatctagtttaattgggagtttttagagttttacactattgtcattgaacaaaaagaaatgaaaacaaaaaaccacacataactcctggagaagcactttgggaaaaagaacactgtctaacacccccccacacacacactttttttaaaacacaaataaagctaataaacttctccaataaataacaattgctctgttaattagttcttgagtgagaaaatgacaataaattatggagaaaggtcatttttattgctatctttgaattttgctaataaagtcatcatgtatactctcaaaggtatccagtgccagtgtatgatacttctctcaacctgtttcttaaggggtgtgctggatacctcctacacaatacagactatagccattgctcttgttttcccgctagaacttaataataagccactattgctgaagacactacttatgttcacagtacatggagaaatcaagttagtactgaccaggaagttcctccctgctggctaaggtgctatttagtctgctgatggagaaaggtcaccaagtcttatctagcaagggaccccgtgaggtacaataatgactaatatggcaacatatgtccaagggtgcaatagtggcatgaatataaccaactaactttctcattgaatttaaggtttgctccacaaggaaatgcatacctggtactagccaagaacccatggttgggagctcacaggacctactactattatttcgctaaacagacaaagtgtcaaactgccctctaaatatccttagatttgtgcaacccttagaccatatcaaagaagtttacttgtgctgtggatggcaattaatgcagaaaatcacaactggtcaaagtacagagaataattaagtagctatggagtgctcagccacaaacgggacatctataattatagactctccaaggttcagtgaccataatggaagaggaggcagaaagagataagagtcagaggtcaagtacgtgcaaaagatgcactcatgaactcagagaaagtctggtcgactgcacaagacctatataagatgaagccaatcaacactccaacatgagaggggaagggctcacgagcccccacttctagctgaggagctcttgacagttgatggattcttggagagtagatttggttttccttaaaggtgtggccctctgataggttaatcatgctctagcatcccatgcccatgagcacaaattggactctataaattattaaaaagagaagacataaagttggaagggactgtgggtgggtcatagctctgagaagtgtaaaggaagaacagggggttaatacatgaattatggaattctctaaaaattaataaaacatttaaatattctataaattaagaaataaagtactaagtaacatagataaacacactttcacacactcttgctttgttccacaccttatagtactgttcttgtagttttctgaataattttctaatttcagagctgctgttgaagattttcttacagtgtatatggaaatggaagcttgcgaactgtgcaccttgggcttcagtgtcttttctttactagatgatatttctctagcactccagcaactcatccaagttccctccattaaaactcccctgtaaaacttggtggcactaaatgaaagtattatcattcagccatagataaccatctcaatgtcaaaaaaaaaaaaacacaagatttaacaatcacagcattgtctaaggagagcctctagccccacaatgcacaagaattatttacagttcacaatgaatcaatcacttctataaaacggtttctgacccctcactaatttcctggcaatcattttctattattctctaggatgcagcatattccctgaaacagttaatcttccacagatgtttccagagagagagagagagagaatgaagctagaagtagagagtagtgaaaagtgtgtggacttagtacatacagggcctgtgtttgattcacattccagagagaaagatagaaaggactagattatcaaagatacactgggaaattgcctaacaccattggtctttaatatctcatttgcatatgaacttgaatgatgacaccaatttcccacatgaaaaaaagtgttctgtaatacatttaactcaaagccctgggggatgttcttctgtatatatgtttctcttattgattgatgaataaaacactgtttggccaatagccagcagaggcaggaagataggcgaggtgaggagataaggagaagtctgggaaagctagacagagagagactggaggaatacaccatatagccaccaaaggagatacaggtctgggcattctccggtaagtcacatggaaaatacatagattaatagaaatgggttaataatcaagatcgagctagctagtaagaagccctagccatcaaccaacagttttataattggtattttgtctgtgtgtttatttggggctgaaaggtgtctgtgagaccaggctggaaagagaaactccagcaacacaacaggatctaaattatctcaaaacaatatcacggaagaccacgtggcacctataaaaatgactgcttcatctgcagaggtagagagggagacttcgctactttatatcccagtacaatgaccctgtgagttcagaaagttcaaaggattccgtgggagctccttctcaaggagtctacgaactactgagttcccaagagagtcattcttgctcaggattgaagcattcttgtcacaacccacttcagttcagaggacttctgattctttaggttctttatgggtccagggtctgttttgtgtagacagggtattcagaccagtgtcgctctcagggctaccagcactgaaagtttcatctggaggacaaatttaacagcttccatttattaagtcaccatgataggctgagaacacagcacaaaggctggccaaagagattgcatagtatgccagcattcacatttagagactgatctgggacaccacacaagcacatgtgatctcaaagccctggttacttcctctccaacacactgcatttcagggatgcagctggaaaagctgtgaattctgaagggcttcagagggaaaatgagaagagcaagagtttcaaggatgcaggcacagaaggagaatgcccaggcaacacagccatgctgaaatataatgcttttccagttgttaccactcaaagcaagcctcaaacatctatctgtaaagaagctgagactgaagttctcaatgtgacatccactctaaaatcccctctagtgtttttcgaaatgattgacacacctagaacccagccacacagattgaaatttcagagttgtgagtaaaatgttatttttatcttgcaaagatggctttattagtcacttcctcgaaggacacagccacacagaagcctacaagaaagtgctatgcttcttgaagtggttgtgattcttttcacagttggtcctttctgttcttcttttggagtttttcaagcatagacaaagtgtcagttggcaagacttaccagtgagttcacagtgaacggctgctccatactgtcctgtctgtaaaggcaaggggctcactctttcttctcagtcacttcatctgtttcaaagacagagcaaagctgaggttactcgatgagaaactcgtctcaatccccaatttccatgtgaacactttgaaaaccttacacaaccagagtgactagggagactatggagtgctctagaaaatacaaaaccatgggtgtctgtgggttcttgaaattgatcttcttcaaaggtggagggatgcagggaattaatgtttgataagcagagcatgtgaaactgctgtgtgctagttaatttggaatcccatgtaaggctatatataaagcaggcttacttccttcaaaggaaaaagaagaacatagttgctatgagcaagaatgctgaggcactgactggagcagagcctgcagacaggctggtcttaaatagccttaaagttgcatttggtagaagtataagacagttctgtgagttctgtccttgtgaaccacagttgttggagtcccctcgcctcgggaatggacaagacttgtcctagtgggccttctgccttccaaacatgataaatggatgttgcctccatggttatgttccatcatagatcaaagatgcaggtttatgacagatatattatagacccataagcagttaacgataagttaattaaaacgcaggctactgtgaggtccccaccaaaggaagtgagactttgagcagaagaagcaggtgctctgcttgttttgagacccagatgccaggagttctgcagctgcaagaaagctaattctaccaaaaaaccacaagagcttcaaagaggagccagagccagagctgtgtaacccaagttacagatccctagtctgtccttgctaagtcaacagtttgactgcagccttaagatggcatgcagagaacctaggcaagctatgctgagacacatgccccacaaaactctacaataagtacaggatgactttaagccatgaaattcaagaaaatgaatatggtagcaatagaaaactagccagctctgtgactacagttaagttcacgtgctggggcgcttgaaaaatggagaaattatagtaccaatgacatggctgcaacaaggattaaatgagttagcaggtaaactataaagacttcctactgcatagccaatattctataaccattaaaattatcagaatctttatttttcagttgaggaaactagactccaacagtgttgcctgggtatgcccaagttcaaatcttaactgagcagttgctagtctttcctttgtacgtcagcgtaagccaacctctccatcctcacattccacctctaaccccatttggacattcacttaggaaactgtggaaggtgacagtctcttaagctgtaacattctgtggtttcagaaagccccaatccgatcaatcaactcttctcaatgctatttttcatcccaaacccacagaaacccttcaaagaaaatgactccgccccctaaggtgtagccttgcccctcttgcttccagttaaccttggagtaaatgctaagcaggatgctgagttacaaagatggtcaggaaagaaactgccctggtgagctacagtcacaagtcacatggcaccgtggctgatgcagaatgcaggcaactctccctggggcacggccacttctcagctctcagagaacaacaaagctcaagagacggagagactacctgcttgatgtggctgctcacgtctgcaacctcagagttaatggggtagagtcagtaggatcaggaggagttcaatgtcagcttcagctacaaagaaagctacacagaaaaacggaaggccagccttgttttgaggccctggtcctgtctcaaacatcaaaacgaagagggaaaagaggagttaaagaaagagccaggacaatggaaacaaggaaatactagttagtcatctggctttgtaaacgtagtagaattatttctggagaggagatggcaggaggatcagaatttctgttcaaggtcattctgagctacacatcaagttcaaggcaaccttgcatttatgaaaccctgtttctaattaattaattaattaaaacgcagagaccagaactcatccgaaaagactctaagccccgggaacaggcattgtggaacgaagcctgggatttccacccaagagcttccagaagctacggtggaaagaactgcacttactgcacctgcgactctatcctgcaagattcttagttgcaggcaaagcccccactcttgaataatggagagatcatgtatttccaggaagtccaaagaaattaggctctgaggatgcatttccaggaacaccaccccaaacctcccagaactctggaagaccaaaacgccccccttctctctctgtcacagagccagcaggattgtctacagcttcagttaccagagattccagtgatgaagtgttgccatggaaactgtgcagttgcctgagggggtttctacaagtctgtagtttccatgtcacagcatgaaacacagatgtttatcagttatgcctaggtcacatgcctatagcatggctgtaaagaggcatgaccatgacctattcagcatttcacatttctatggagagcaataaacgtgccaaattagaaacaatgtgtttaggatgggtggctgaccacaacagtaagtgtgcaaaaccagatgaatgaaattttctttgtaatgtgtttccatttctataaaatgtttagttcatatatcttaaacacctgaattaattagcttgacatagtcaaaataatcactttgaactttcacacatcagcttattatttgatggtagaaatcaaccctaaatataagatgaaagaagttcacagattggttgacctatcttttggcctgttcattgcatcatgacactgttcctataggaatcactgcattcctaagttccctgttctgccaaagccatccaagccctgccgacacgtaggtgctttccaccaggccacctgagtttcgcctgctgccatgttaaggtcccaagtaacacacagagacttatattgggtacaaattctgcttggccaatcaactaggatttcttatatactagctcagtcttaattatcataaatttatatattttataagacttatcttatcatggacaccttccactggcgccctctcttgctggtggatcacatggtgactccagaacagagaccaggaggatgagcaagagaaaaggaatgacttcctgtttgtccctgcttatatatgagtctgcctgctatgtcacttcttgcctggatcacatttctttactacatttcccagaatcctccttgactcctagtctcgcctaaattgcttcttcattagccaacagtactttattcaacaaccaataagaagacaacaaacacagaaggacattccccatcaccccattatgagtcttacaactgctaaagaatcacaaagtggtatgctgtctaggtcggtggctctcaatgtacacagaccaggtattccgagatattttcaagggcattaaagatcagtattatattcatgatattactgcagcatttgctttctggcacaagtgtgtgtgagtgcatatgtgggtgtgtgaatgaatgtacacctgtgcccacgagtggaggccagagatcaatgtcatctgtcttccttagtcacttctccaccatatatgtttttgagacaggatctctcactgaatgtgaagctcactagttagctatccatgcaaagctggccaacaagcccaagagatttcctgctatcacttccccaggactagggttacagccaagcccttcctggcccagcttttatgcgggtgctgaggatctgactccagtcctcaagctccacggcaagccctttatcaaccaagccatctcccaagcttcactgtttttgcttttttcgtatccatctctcataattgtgttttagaaggtcccagggggtaaagtaattcatagtaattcaatgctcttactgtctgttttaatatttaatagtgtaacaaccaaccttaattcttttaactttttttagagagcaaaaaatttaagtattgattttcaaagacagccaagcaaacaacatcagaactcatcatactatgcagtacaatcagacataaagcaagccttaggaatccaacatagaaaaaatcagcacttgggctgctggagtcttgctgaaatagtgagagaatttaaacagtacgagacactcagctttgaagaactgaggcctacaagtgcaaatacagcaggctggtaaatacctcacaaagccattctctttttgacataaatgtcattttcagtagctatagagcactcagctcagaccctcattttctacctttatggccacatcatcaagtcatagactacagagggtgcacagatgtgagacagtgaacaggaatggtgggaatggttgagaaggaggagaaaacatctttggcttgtgtttgcaggacccaaggacttaggacaccagaaactcaatggtcaccaaagtcaacctgagatactggtgctcaagttggttgtctcactctggtgatgattaaagatacggaacttgtaggagaaagcaacacagaattagttgtctcagttaagagaaattaataaaaagtgaggacacgaggcaaagtgaaattcccaagagcaggaagggactcctaagagaaaggaaagagttaaactgttttgtctgggtgggggtatggtattcattgtagaaactagatgaaaactgaggtaatatcacaggtttagtggttgaaagggtgacatctgtttgtgttctgttccagtcgggagacggccatgtgttcatgtgttacccatcactccccccaccccacacacacaccagtttatctctgacttctgctttgtcggctgttgaccttgaccgtctgctagctgtcggatctagctggcactgttaccactgaccttgcaggtgttccaaactgttgattagtctgtgctttgttttcacatttatggggccagcttgttgtatcaccatggagctaattcctatcacagctaccaagatgtagccacgattgctcttggttacttcatatttaacttcatgcctgtgttatgggtagtctctttcctaaactgagtggaggcttctagaaactgtccttacttactatttagtcttttgcaattggttgcagtagtggcaaggacatgtgaaaaggacagccatgtcctgcacatgctcttcaaggcagagcaagtctcaggaggcagctagcttgctaacgctgccgacccagagccctcccttcctcttatatgggcagtttggttacaagatgcaagctcttcagtttttcctctctaatgttcccacactaagtctttgaaccccaacacatctgttctcaccctaacatttgtgataacatagttttaaacatgagtcctttttcccttactacccatggtgagctagcttccatctcagagagatataaatgacatgttccatccctgctccccctcttgccaggtgaagtcacataaaggtgaggtgtgtcatgaggacgagccatggcaaaacaagaaaaaaaaacttagtttgcttacacacatgcaattagagcactggttctcaacctgtgggtctcaacccctttgggagagtcccacggaagatatcctgaacatcagatatttctgttccgattcatagcaaaattacaagaagtagcaacaaaactaattttatggttggggtcaccacaacatgaggaactgtattaaaaggtctcagcattagagaagttgagaatcactgccttagagagatgcagatttctctcttgctgactgctgtgagtggttgtgttgacagccggaccaccagcctacaagggcaatgagtaactcaggaaagtatagggaccatgcccaagataactcgaaaacccaagcctatctttgcccttctttgcctagtctcagtgtctatatggttggcttctaccttacctctctctcccctcggccccgctaaaagtggtccagacgttgcacttacccatcctgaagttacaggcttctccaaaatcagtatcattcaaccctcaggtctacagtgagcttaagtcctgaatgctacctttggttgtcagaaagagttaatttgatggtttacagtaaactttaacttttaactcagttatcatcatttaaaactaggaagatttcagatataaagtgttcgtgtgtgtgtggtgtatgcatctatacctgctcatgtgtgtttatgtgcatgtgcaggtgtgcatgtgcaggtgtatacgtgcaggtgtgcatgtgcaggtgtgtatgttgaaagaagaggtcagtgtagggttgtcttgctctattgctctctggattactttcaacaaggtccttcactggatctcaagctcacgaattcagtgagaccagatggccagccagtctcagggatgtgcctgtctctgctccccactgctggaattgcaagcaagcatgcaccagcatacccggccttggcctttgtgtgtgtgctgaggatactagcacatgtcttaacacttgtatggcaagctttttaccaaccaagccatctcccgagtcccagatttccagctatcagagactctggcatcagtgagcacttagtgatatttagttgttttctctgtgaattgggatcagaaaaagagaagccaggctttgatgagggacccaaagccatttttatttatttattgcccaacaggaaagaaggcaaacaacctaagtgctaagatgataagcaaatggtactacaaggaagtaagtaatccatgtaacattaactccatgggagagctggcttgaggctgtctgttctaatcctcacacttcagtagctaactcagggaaggaaggcaggctgcaaacagctctggaggtaaactgattctagcatcttgttagtccttaacgtgctcctccaggttcacaacctcattcacagatggcctgacctggccgcattgctgtcacacagctgtttgagaacattcatcagaaatgtttgatttagtctcagcttgttccttcaccttggccccagtacagtccacattcttcagatttgataacatctgagttgaggccatgaggcatgtaacctggaagactccctgcgggagattcttttgctctagtttctaccttcttgcatttatccccatcccctttgctcacacagcctctagaaactaatcatttcctcttaaactggccttttacagaggtgtaaggagccacagtctcttgctgacccatacacagggcttgggaacatgagtgcctagaaaggcatgagccaggtgaagtgagcagccacctacccagagggtctatgacaagagtggctacatccacaaaccttctctgtgaccagaacagctggccatcttcccaacaacagtagcagcctcttgctatttgatgcccaattcgttgtctctaggtttcaactgcccccaatagactggagggtactgtgcttctgtcttttaaaatatggagcaaacaatgacaagaatggacagaagaaaatgtctggctggtattttgtgattccttaagtctcttttttacctccctaagtctcttttttcctccctcgccctttatctccacccttccctcccctctgtctcccccacctcctgctggaccttctgaagagcagggaatgttcagaatctagggcctcacatgctgggcaggtcctccatacctgagttacatactcagtgcaattttgtgttgttgttgctgttttttctttctttcagtatcaatttacttaattttttttccttaaaaatacactttggtttgttgttgttgttgtttttgtttcttcagggagatgtacttaagctcagaattcttacccactttcatccatcaaagcagtattttccagaagacagaaaggaatctaccagacagtgagcattctccttggagactttgcactcagggaagagctggggacagctttacccagtcatgtccttttctccctgagtgtcacagtgacctggataagcaggtgaggtgctgtcaggtgacaggggacagaccagatcatgccacctgtctcagttctcaccagccaaaccaacagcctttcctggccttcactgggttagagttcattttcctggaagagcagggtgcagttgacttacttggagctacataaaggaaatgattgtaacccaagccttgagctgcactggtctaatctgatttagtcaaagggagagggagggccacccccatgccttcaatgatggaagcaaaaagcaggacctcctctgttatactgttaaagatggtgacctgctttagggggaaatgaactaggcacagttcctctatccatttttaaagattctaagaacagaacactttgattgtataaaacatttacctacagtactcacaggaaatgttccatgacccagattgacacttcatctgtacccaaatatgcgtgcggtgaagagagcatgcacaactaggatctaccaattaataattggatattaaaattctttgaagttgtttaaaacttagatattccaagaacactactgaagaacacatttcccgaaggtaaaataaggctgtggggaaataaaagtatgtgaatgcgaacaaagaggcaagaccatgagaagcagcttctattaggtttttcctctacctgttaacaattatacataagttaatagactttctgggcaccaggtttctgtgtcacccctgcaagtatgtcctaggtaatcattctacacagaggggtttgaagtcaatcaattagcaagactgaaggggatacagaggagagcgttaaatacatcacccttggggaggggttacatttttttaatggattcatttattttattttgatgtgcatgagtgttttcatgcatgtgtgtatgtgtaccacgtgagtgactggtgcctgtgcgggtcagaagaaggcattacagatggttgggaatcactatgtgggtgctaggaaccaaagtcaggtcctctgcaagagcagcaggtgtccttaagtactgagttaatgtgctaattaatgatggtgatgacaataagtttgtactactagtcatggaaacacttctgacatagattacttcttccctggtgtacacacaaacacctgccagtagcgatgcgtccccctttctgactttctgactccttagcctgtcatgggtgtaaaagaccttcatctgggaggcggtggtggcagtacttggaaggcagaggcagatagatctctgtgagtttgaggccaacctggtctacacagtgagttccaaaacagccaggtttcagttacacagagaaaccctattttggaaaaataaaaactcaggaaaaaccaaaaacaaaaagacttttcaacttttcactgaaagtgttaacatccttctttcttttaacccgtttcatagtaccggaatctttgtgaaacgtaccctgagtatagatttgtagcgagcattcacctatggatgagctacaagctgactactttgaatgtacacctatgagttccaattttcttattcaaagtgtaccattttctttctttctctctattgcaatggttctcaaccttcctgatgctatgactttttaacacagtttctcatgttatggtgaccccaaccataaaattattttgctgctacttcatgactgtaattttgctgctgttacgaattgtaatgcaaatatctgatattcaactcctgggacggggtctcgacccacaggttgagaatggctgctctattgtcttctagggaagagccagtggagttctaagctgaggaggcattaataaagtgctacctgtctccttcaacataacaaacaatagcaagacagccgccatgatggtaataggtactgctaatacagaccttgctgtggtgatatattatttatgatttaagccactggagatcaaaaggcaaagctagccacagccatagagccaggcagtgctgatacacactcttaattccagcagccatgctggccagtcatagaggtcaggcagtggtggcacacacctttaatcccaggactccagggacaggcagacggatctctgtgagttcaaggccacactgagctttacaaatttgatccagtctaaaagagaaacagctcacaccacggtgatctcagcatttgggatcagacacctttaatcccagcactagggaggtgtagacaggagtgatatggctggggagagagaggaatataagacaaggggagacaggaactctgaggcttggtggagagcagtgcagtcagcattgcactctgaggatccatggagacagggtcacccatttgagtctgaggtagaggtaaaagctagtggctggctgctttgctcctctaatcttcagcatgaaccccaatatcaatctccgggtttttattacgagtgttacaccttccttccctaacggaatcaagcgtcaatcacatgatctcagactgctgtgaagagagcctgctcagagcttaatagacactcgtgcttacacgtaagacctataacccacagtcagaacacctgagctcaaattccgagtcttcttagagtgaagtaatgtttgacaaatataaagcacaatactcactaccattccctctccattttatgcatgagaaaacagaaagttctagaagaggcaataaaattgagcattgagggaggaaggaagtaaaacaaggagcgtgcagagttctgatgtagtcctgcagtgatagcagtaatccattgcctttgaaagttaacagtgagatcccagggagggtcaaatccatgggcctcagacagaattgactgtagaaaggggacttccatcgagcatcacaaacatataattcctaatctccatgcccaagacacaggatggacattcattcacacttctttcttaggcagaatgattcagtgtctgtgcctagccacctggcacatgtaaataaatctaaacgcacaattcttctaccagatcatgtttcaattccaagtattcactagccttgaagataaattctaaattttgtggtattcaaaagacatttcataaacttataaacagacttactagcaggagagaagcattgtcatcttgaatacataattttgagcctttaaatatgataattaatatgcaaaataaaatgtttggtaaatttaaggtgtcaggaagatacttaaacacatttttctaatcataaattcaggatgataattttgcttttctgttggcaggtccaaaaaaaaataaaagaactctgaaggcattcatttcaaataagccactaacttgtgctgttattgtaataggtttccctttattccaaattgcttttttaaaaatactagtcaaagatacttagttcagtgaacccatttttaaatgacatcattttttttttttttttttgcttgccaagatgactgaggctctgagatagatgggaccagttatccatttcctaaggagagttttccaacaaatgatgctagtctgacattactattcacaagaagaaaacaaaacaaaagccagatatcctgaagcatcggctcactgcttcctcaagattctgcagacacaggactcttgcactgttcagtgtgctcctatgagtggttgcatttgtttagttttgaagcagatgatctcttcagtgcagtagacaaaagccgcagaaggctgtcgaatgaatgtgactatagggtggtggtggaggtggagtactgagaatgaaaacagggttacccacatgccctttcatggccctctctagtaatacaccaaacattcttcaagaagcccttatgtcaatggagtggttcaaatgttaccacctcccacagctgtcattatctctccacccctgcctttctcccccgtaggtgacatccctctcatgctaatgtaatgttctttctgactgtagttcctagactacctggaccacagtaacatggtgggggagggagatgctggcaacaataggtaattatgacctaaatgaatcagaatttctgggaagggtgcccctggcatctctctcactaccccccttctctctctctctcttttaatccaacagctgaggctatgcttattcacatcagaacttgagacatttcatcaagtaaaattcctctaagacagtaacagataaccctctaaaaatgcctactcttcactcatctgacattgttttaggacatactcatggtttccacaaatgagaggcatctctcctcttcttcacccttcaatctacatcccaaatactgatttttccatctttgcagttgacatgtctttatcctatggaatagagtagtttttcgtggctaccatttaatttgagatgcagctgtattccttcatctccaccagggcatccaactctgatttatcaatggtatccaaagataaatacatctttgctacaaatactgcctattccaaataaatttatttctcctatcatttacacatcattacttcttaagctctgaccatgaaccagaagttagtgaaacaatggagaatgaaaacacagacctgtgggaactttctggactagtggcaagggctatggcagaaaggtaaaaatattaaacaattggctattaaaaggttatggcacctgctacaaggcagcatagagaatcaattggaggttagcattttcttaaagcaaaaatattgtggaagtgatggtatattctctagaaccatggcattggtttgtctgatgactggagaagcaaactttcatgatttaaactatgtcagtttttcctctataaagaaaccatttttttgcaatgcaattaaaaagcattttgtaagcagttcttttaacactatgcaaatattctgttaccagctaactttagcaactaaagatggtttttttgtctgaaacaatcactgcaatgttttaaaagggtgattttctattaacatcattccttgcatatttactaggttagcaggatttcttggatgaaagctgctttgcttctagataaagtttcaaaaagttaaacagtctaatgagtctacccatggtgagagaaataatgaggatgaacacagcacctctcaaatggcaagcactctaccaccaaacttttccctcagttgccatctattgttttaatggtccctacagtctcacttgttaaggcttacttcacagaagatatcatttctgagcttgtggaatctttatgaggtgcagcctggtgaaaagaaatgaggtctgtaggtagaactctcccttgatggcagtattggatgtccagacatgagtcactcactatctgtcagtctgtctcttctctctcacaccttcctccccacctcccccacaaactttctttttcctggcttctgagaagtgagcagctgttctccaccatttgtttcctgtcttaaggctttgccttgttgtagactccgggttaatggaactggctgactgtggactgaaacaacctctggaaccatgagtcaatataaatctttccgctttactgtctcaggtatttcaccaggaaagcaaagctgactaagttgatcttcaaactcaaaatacttagaaatgtgtctacgttatttttttattctgacacctttatgtttagacatgtttggataaatagctcttggtcatgtctaatttattgaaacatatggaataaattgagcattatatattttccctaagaaaaacatccttttcttagtcttaaattataattttgggaagtgacccatgagtctccagatatatgtttagcttcttgtttaattctcaattcaggctaacagggtggtctgtccaaataaggcattcggtacacatttacaaacttgaaattatcaggctatgatggataaagtcgtagagaacgcaagatgtggtggtccggacaggagacaagtgtatcattgtggaaggaagtagcccaggtctaaactagagacagtaaatggaataggaaatatggctattggggagcattctgggacatggtggcatgcaggcagatgtgttgctggctacatcttgatcagaagggaacaggaagtagattgattcagtgggcatggctttagcatatgtgagacctcaaagtccaccatgaggataatggactaaatctctgaaactgcaatccaccacctccattaaatgtttttctttatgagttgccgtggtcatggtgtctcttcccagcaacagaaacactaagacaccagcagactaatttacactcttgattatatagatctgaataaacatcaaaaaggccagaatcaagggattgtctacaaacaaaacatacaaacagcaacaaaagagtgctcttaaaaggcataaaaaatcatgaaagccagaaagattgaggaatgattcaagattaaagacactgagtcgataagacaactaagtgtagtgtgtgatcttggactggtgcttccaatagaggaaggactttggtaaaatctgaagtataatggtagttttacttctgtgactgttgatgtttatagaatcagagtaagcaacataaagaaatgttggatactacttccacaatcatttggatacctgcacttattttttggattaaatattttaagtatttgtattaagtctgaaaatttcacacaatgttcatattcagcccttaaagtcctcccatagccatcttctccactttcacctgcctacccacccaattcaatcacaaacccacctcttactaagtccagattgtgttactttcttactcctcttggagttggggcaggccctgcagtatggttgaccctctaggggtcacatcatcaaagaaagctgactccccctctgcaagcagttgtcacatgccaatagctgtttagttagtgctgggacaccatgcccaccaatggccttccatgctgggacttttgtctggcttccaattgtgctgaaatgaggtctttttgaagtgtttaaatagtatctttggaagtcaacaagtgatatagtaacaaagtaaaataatatttgcatcagttgcagcccgtataatatccattatcaccacgtcggatgaaaatttgaagatcaatagtaaaaagacttgagtaaaaatgaccaaatgatatgaacaagattgtaggcaaacagaaacagctacatactaggtgaaaaaaatgtttaagatcactagtaattttttaaaaaatactgattttcagcacagggatataggtcagtagttcagtgtgtagccagaatgctccaggtacaggtgttgggtctttggcatcacaaaacaaaaccttgaatttagactaggtcatttcatttactggactgataaaattcacataactgatcagacccaatagtgatgattctgaagaacatatatatgctcctgttgaccaagaaggtctaacttgaaaattgttctttaggttccttgactaaacacacacacacacacacacacacacacacacacacacacacacacacacactgtagcatgctttgaaaatattaaaattttgaaataaatatagacatcaaaaggtaataatttagaagaatatgttagatgatgctgttaaagaagatttaaatgcttgcacactggaccacgagactgttcaagttagggcatcaggaaaaatagcaagtgatgaaaagcactcaaggcaaggcatcatgcttggaatgtggatgcataagtatttaacttgtatggacattgggaattaaaacatctggtacgcagctgaattttccttaaatgatccctcaaggatcacatcacaggagactttcagttcatttgctgtgtaatttgctgcttgtaaacatcactttataactgaaaaattacatctttcctaagtctgcaagctttgagtgcttgagactcaatttcttgggtggtcaatatctctgtgttggaacagatgattaagcgggatgatgtcagtgttacacatcaatgacatccaattgccaggaagagaaattttctggctgtagaacattttggaacacagagatggagaaccttactgcaaaatcttccaagatggccctactaaattcagagccccaagtccttatccatgttcccatctgcctttatgatgacaaacttgtattttactcaactgattgccatttctaggaggtgtactatgtggctcaagctgagggatatatttatctgtattacatttagtccatcgtcctttcaaaattgtacatttgtgtgtaccagaggaggtttaagcaccttggccagatcttgaaggcctccttgttctgtccccctcctttcccatgcattattggattgttttgcactgtttactatgtttttcatagccttcctttgatcaaatctatctccaaacactggccactcagaaggacgttcgacattatctctacagaagcctgctaccactgagggcttctggacttaacacagggcatgagaggtaccattccagtccagtctaagaattccaaggcagccctcagggctgtattgtcgtgtgtggttacgtgcaaatgtatatttaagacagatggaacacatgcttaaaaataaaaacagaactaggcatctgaatatgaaattagacgtcactgttatatttctctaaatatgtcttactaaccacttgcatccacacctcttgccaagacttttagacagaggctaccagattccaccccaacctctagaagagaaactctgtaggtaggatggaagacagtttttgaactaactcgaggattacttttataagtcatttcataattgacaataccaccctcaatgaaagaaaattcactatgtatgtccttagaacatgggagttctatttctttcaacattttggtattttactaattagtaaatccacctgattccaagttaattttaattttatttacatacttgagttttgcatcaattcagtgagcagttgccctgtgccatagaaacacccaaacatgaagggccctttccaggcctttccaatcccattccatctcctggctccactcttttactgttagagaaaaaaatgggacatttagaaacaaaccttttgaggacaaaacagatagaaaaaagaactagagtcagtccatcattagaccaaagcaaggacccatggacaaggaagagtcctttaggtttcattttaaccacagaaatgacagcactgttgttaagggatacagatttagaggtaggacacagaatagtatcccgttcagaaaaaatgaaatcatggggtcagtagataagagaaattcaaccataatcccattactaaatgtggttttccttttgcttttaattagaggttcatggctgattactgttcagccatttgagcttgagacagtgttctaaaaggaacctgaaccagggcttctttttgagcataagcaaatgcagagcacgaagtcagtacacagggagccagaaaaggttaaaatgagtcatcctgatctcctgtttccaaattaactcaatgaatcaccaagtcaactcaccagttgatgatctgtgatggttcactcaaagttacctctcataagaatctttgcaaaatctctggctcaaatgagatgccattaaaacattagttatggaaagtgtttttataaacccaaaccccaaatccaccaaatctcaagttctgtcatctatagtcaagctaaaactcaaaaaattgaagagttcctttaggaatggatgaaactttggttggttaaataaagaaatatccaaatcaaaggatgtacatgttatttaaaatgccttcaagaatataattgatggtttacagaaaagctttatctaagaccagaaaaagtctcacatgctgaacgagatacaacattgggactggaagtgtatagctcagtggtcaagtctttgcttaatgaatgtgtcagtgagtcaaatcacagcacaaaacaaaacaaaacaaaacaaacaaaaaaaccctgaaaacttggtcctaattatagacttctcaaagttatgaggaaaaaaaaaactcagaaggctttaatgttgtgaacatccataaatccataaatccaagatggcagactagattgacctagaaaaaacctgaaagaactgacaatttctactcttcaccaccacagggatctctacaccagtaattagaatctggtctccaagaactagatgcagtgaattaagtaagtcaaagaatagctacaatttactttgcctgtgccctccagaaccttctgcagaagataaataaataaataaataaataaataaataaataaataaataaataaataaacagaaatacaatcattactgtgtcctgcttggagagtggaagctatatgagattctggatcatggggaaaggtagatggcacagagatccttgaaatactgacagccaatcctggactcagaacctgatgcactttttttaagaaggcaaattctccctatctcaataatatgggtaccaattctaagttgtagatgatgaatctgcatttgatttgggagccatggggctcccacacacatcatactcactcgtcagtcagtatctctagcaggcaatatgcagcataggagacagggaaatacatcagaaaatctggctttgaccccccagctatatcacctactagcttatgacttaatatacccggcctctttgaacttcaatttttaaatattgaccccccagctatatcacctactagcttatgacttaatatacccggcctctttgaacttcaatttttaaatatgcgaagaaatgtctactacaaataggagttgtgatgaacattaaaaatatcaacaagcacacatagctcttcatttatgtccaactctatttattgacacacatactaatccatgtcttccaattcaactcttaagagctagaaagacgaggaaacaaaacctcacagaggtgagcaacttgcccaatgacacagctaggaagttgttgcaggatatttgtttatactatgtgaaggtgtgtctttgtgattggtgtaataaaaggctgaatggccaatagctaagtaggagagaacaggtgggacttctccagggagaggggaactctgggaagaatagaggcagaaagatggcagcgagacagacagagaacaagttggatgtacagaatgggaaaggtaaaagctacatggcagaacatagattaacaaaaacaggttaatttgaattaaaagatatagatgggaacaagcctaagctacaggccaaactttcataattaataataagtctcattatttaggggctggcagccaacaagacagactaactatagtaggtagcaaaataactatcccataacttagtatttttcaaattttgcatttataccaggactcagcagaaaaggatgctgggatcaactggtgatgtctgaacgagattgtaacaggttggtgattatttttatgcctctttacatataaggtatcctgacatctgaagttgcctttctttttttttcttcttcaagacagggtttctctgtgtagccctgtatgtcttagagcttgctttgtagatcagactggccttgtactcacagagatccatctgcctctgcctccataatgctgggactaaaggtgtgtgccaccatacctggccactgaagcagtgtgtcccaaggatctttggtctagatctcatttcctcttcttcctttttctaaacaactcctattcagttgtcagaatgctcttatgaaaacatgacttcccaggcatggtggcacatgccttttatcccagcattcaggaggcagaggcaggcagatctaccagcctggtttatacagcaagttccagaacagtcagggctacacagagaaactctgtcttccgaaaaccaaaagaagatgaaaagaaagttgcattattgttaaatggcacaatattaatatctaggtcaattctggtagctttttaggtttcatcctggaataagatcctgaatggcatggaaaattgctaatgactagagatggaaagtcagaactacaacagaaagaagataaacttctaacattgaaaaagacttcccccagaaaaatcagagaccttgcaggtgtttggatgaagagactgcttttcataaataagggttacgaaggaaccacccatctgaattaatatctctaagccaagtgcttcaataggcaaaaataacatggacttaatttaaaagttagaataggaatcaaacggtctgtggttttgaagactaagcagcctggtaaatgttaaactggcctctctacttggctaaagaggtagaggaccacactagccatccagtggatttgcttagaaatgcaaataatttctgacaaaagccacacccagatgtagttccatccagattattcctgaatggaactctgtgattgtcggctcaggatttctgaatatgccctcagcacagtcccgtggacagttcacacattcagggagctgggagaaacaggtcaacaggtaccaataggatgtttcaaaacaatggttctcaaatgtgggtcatgacacttttagggtcaaaggaccttttcacaggggttacatatcagatatcttgcatatcagttacattacaattcgtaacaatagcaaaaatgcagttatgaagtagtaataaaataattttatggttgggggtcaccataatatgaggaactgtattaaaggtttgcagcattaggaaggttgaggatcactgtcttagaacagtggttattggtccttccattgacgaagttgatcttcttcactgaataaattgactgtgctttgatttggtggagtggcttggtgatttatataaagttactgtggtgatatcttttttatgatctaataaagcttgactgaagatcagagtgcagatctaagccattagttagtcacacatctagttaagagctaaactactagttagacacacacacacacacacacacacacacacacacacacacacacacgcacacacacacacagctactagttagccacacacctaagccactagtgagctacagaggacagacagtggtgacacacaccttaaaccccaggactcaggagacagaggcagatggatctctatgagtttaaggccaccctggggtacatgatagtgaatcagtctaaaagagaaacagagctcacacctttgatcccagcacttggaatgacctgcctttaatataagggagtctgaagtttggcagagacagattgcattctgaggatttgtgagacagaatagcccattttggtctgagatagaggtaagagctagtggctggctgcattgcttctctgatcttcagctttaaccccaatatttgtctctgagtttttattgttcatgctacaagctatgttcaaaaaggaaatcaaaatgaagagtcaacataggttaggttgggaagacaaagacttctagaacctgattgatgttcatttgacactatttgttgaacagctgaaaatcatcagccctaagggatggaaaaccgactctggtattttcagcagagaccacaagtcatttctcatagtttccttggaaataacttataaatccttaaggagggcaagaaaaaaattactggattaaacagaaacacacgcagacacccagtggggtgattaaaatgttaactggcatggcttgagagattgctcagtgtgtaaagctgcttgcaccaagcctgaattggatccccaggatccagatggtgaaagagaacaaactcctccaaattgtcctctgacctccacataagtagtgtgcatgtgcacacacactaaataaataaatggaaaaaatgactctaacttgaaaccataatggccaggagagcacttgatatgtactcaggggcatccacctaattttgactaaacgcataaatgaatgaagaaaatttagtggacctatagtgttatttttattcagctgtaaagaaacatgaaattataatctttaaaaaaatgggtcactgtgttaagtgaaatgtgccagccagactcagaaaaacaaactgcacattttcccttgtgtgcagtcttcattcacttattcagcttacacacacacacacacatacacacacacacacacacacacacacacacacacagagagagagagagagagagagagagagagagagacagagagagagagagacagagagagtgaggatatgaaagtagaaaggggacccaagagggagacgtctatataaagggaagaggagaaaggaacaagagagggatatatatatatatatgtgtgtgtgtgtgtgtgtgtgtgtgtgtgtgtgtgtgtgtgttatatcatgaagcagaaaaagagctatctggagggcggaaggctaacaggagtgggggggcagtgtgagaagttattaataagaacagtataatgtcatacatgtacgaatgaaaagtatttgtttgcatgttaaaaaattaatttaagaatgatcagccttttatagttttttatttttgagacagagtttctgtgtagtcctggaactcattctgtagaccaggctggcctcaaactcacagagatcctcctgcctctgagtgctggaattaaagacgtgcatcaccacagtaaaagtaggcctgagaagaaaccttaaagtaagggtctcaaccaacagacactaaaaagtgttaactattatcatcagtccgttaactttttatcaaccctttcaggaaccaagcccagagagacttgattcagacagtgtgcattccgctgttgtgcacacccacagaacacgctggccctcactgttccctccaagtcactgccctgtgcacatgggcaaaggactgagaatctgactgtataggccaaagggtgcatattttactcaaagaaacaagaaaataaaatgcatacatgccagttgaggtgtactcaacactggattcccatggactaaaagttctgctatgaacagactgaacagatagcttacatccagttaattttcctggttgatcccagtaacagtccctgcctttgattaatgaggcgctaacaccagtggttctcaacctgggggttgcaacccctttgggggtatggagcaaccgtttcacaggggtcggctaggaccatctggaaaacacacatatttgcattaccattcatagcagtagcaaaactacggttatgaagtagcacaaaaataactttatggttggctgtcaccacaacatgaggaactgtattaaaggatcactgcattaggaaggttgagaatcacagctctaacggaatcaccctactgctcagacattaacatgtttaaaatgaacacagatatttacaatcgatttaaaagacgcccaacagaatctgctgacagagtacatttgtcaagttccagtcagcatccaccaggaagacaaaaacttgcccattgaaacgggtctggaaataactactacttaaaaattgaaaccggaagtcaagcattcaagtgttaatttgtctgctctcacagtcggggttgaccttgacggaaactcaaattaacctgatttctggaaacacttttaaaactcaagacttcgtttaattttcagtggctatctgaaatgtctggaaagcgaagtgctcaccagggcttacatgggaccactcttttgaggaaggcagaccagcccctccccctcccactaacctagagattttttttttctttccccaatcctctaaatcagattcttgaattgctgcttcattgtgaatttttcttttgaactccaattaatcacagcacttcgggctctagactcccagcaggttgggttgtttcggggagttctggaaaatgtttccacggcattgcactttttttgtgcatttccctgaagctttcagcgaaacactcaagttattcctataatagaatatatctcaaggggctaaatggcatcaatgcaacatctagaaagccctcctcccccagcctccagtatgaaggtgttttaccagttctcgcccctccctctttgacatcccgcgcagccgacttgaagacccaagcaaaaccagtgtggtgggctctcaggagtctgacatcatcagcaaggatgcatcccaagtctgaaccagaaaagcacgcgcatccgggtccaggtcaccgcggggagggcccagaggccaggaaccaccgtcccctcctttccccagcaactagaaactaaccctagggcgagagagggacgcatgggggcagggaccgcaggacgacaggaagccagcagtcatctccacgcacctccggggccaacgggcacacgtgcgccgccactcaccagcactcgggcgtgtcgggagctcgcgtgggacggagactgcggcggctgccccggcgcgggccgcgtgtctcgggcatccgtgaggccgctgcagcctgggcgacggtggctgctccgcaaggcaccggcgctcggtgacggaggcaccaggctgggaggcgcccgcgggctggtccgggccgtgccgcctctgggttctctctgctcgtggtcggacgagcgccgatgccctcagtggcttgggctcgctcttgctagcgggacagccccaagctccctggcaaacccacgtaccggccggtgaccttggaatctgtggcggctctttccgcggcagcagcgcagggaaagaaattgtcactgcaatggtccgggcctcccctgccccggcccctgggtgccgcctccgcctctgcctccgccccctcctccgtagcctcagcctcccacgtgctgtagaaaaacctccggggtggcgggtcccgggattgggggttagggaggtaaggccagagtgaaacggttgccggtggtttaagctcccccgcccccccgacaacctgcatgctcgctgcccaaaggttggccacctgaaccattcagtgaaccatcagcttcgcctagaaagcagggaaatggctgggcgactccaaaactgcaacgtacacgagccatgatgcagctggatttgccggtagaatggctccggatatagggttacagcttatgtaggaatcccattttgagatttgtctattactgagcactcccgccaggaaacactctctctttcccccaccttcttgatacaggaaaatacaaatggatagctccttgttattactgtagttactataagcggtgccagacacacactacacgcaatctgacatgtttgctgtagccccatgtataaacgctgcatcttatactctccacgaataagacatagacaagtaaattatttatgatttttttttctcagcagcaaagtagaagaagacacactttaaatctgaagagtgtgggaagaggaggaaatggaataggaagaagccactgtggttggacatctgtgctggctgaatttatggcaaattgacacaagctagagccgttttagaagagaagagagcctgaattgagaatatggcttcataagacagggcaactcagcccaatgtgagtagtaccacccctgggcgtatggtgttgggttctataagaaatcaggctgagaaagccatgggaagcaaggcagtaagcagccgtagtccttggcctgcatcagctcttacctctggattcctgtgctgtgtgactccctgctctcacttccttggagaatggactgtgcccttgcagtaaaataaaccctttcctccccgcgttgattttggtcgtggtgcattatcacagagatagagaaaccctaagactacatcaaaagctgcttctttgagcgagcagatccaccaactcgccaacgttttaggaacattgctgttattgatgagactggggtcttttctccaactgaggtgggaatccagcttcaaatgggaggaaagaccataggtgaggcaaggcatgctggctatctggttagtttttcctttggaaaccaaacttgcaaccctgactctgccatcttctgagctgtttggcttacccctgtccccttctacggggacaccaccctaccatggtgtaaaataagcttcatctgtcaggggcagtctgcagccttggttttcaagaggcaataatgttcatttttgtttggcttttgttgttgttttgttttgttccaaatatcaaaaccaggaaatcccccaaatatttacatttttaattctattttttatttgctctgagggagatcaagcccagagcttcaacagtgccaaggatgagttctagccttgagcaacatctctagaacccccaaattcagatttgtagtgtttctcaaaaatagttttaagatggcctacctgctatagctgagtagcaggtggcttctttagagtcttcagttttccacagtgccggggtaggatacctgcactcaatgacatctgaagatttcgtagacatttgagtctgatgctctgcacgggatgaacttgtctactaggcaaaatgcattctggtggtgatagtgaaaaagtaaccatattctatagccccacatatgtatttataatagcgactgagaatgtgactttacctagcatccaaagccccacctaaaagcagagtagggtggggcctacctgcagttccaaataatcagaggctcagcagggagaactgactcgacttaagagttctgggtcagcatagccaacacagaaaaaaatcctggctcaaaagaaaaatagcatttgggacaagatagctcagagggtaaagaggctggctgctgtgcttaaagacctgagtttgatccctcccatgtaacagaaggaaggacccactcctagaaactgtcctctcatgtcctcatgcgcgcacacacaacacaacaaataaataaataaataaataatgttgaatttaaaagcttttttgataaaagtcaaagtgacactatgttctgccctcacactttcatttagccaggcaggacactattctgccacttaaattcagcctaccagagtctcctagctggctttgaatctagattttgttacttaaaaacttcatagaaaaagtcatctgtgaaggggctttgtgtctagggacagtagctccagggtgatgatgatactgttcttcagaggctgtgccagtgatttctaaacaggctgctggagtagtgaaacctattctgacgtccaatggccagcttccctgcctggttgatatgcagcttgatggccttcctgtacctttccagttaagctaggaggaaacagttagtgtttgccagagcaatttggggatgacttaagcactttaggaagaggtactacatgagtctagaatttttatcttagatttcaaattttaatccatgatatagttttcctttcatttttaatgaaccaatttcaagattacccccaaatctacaaatctagggggaaaactgagaaagagagagtgggggggtctataatcccagctattcatcaaaaaagggagtggaagatgtctaactgaaggctaggctgggctatagagtaagttcaaagccagtctgagcaacttcctgagatcctttctccaaattaatgataaaaagaggcccggggtgtagctcaacagtaaagcagttgtttaatatgcgtgaggccctagattcagcctctagtgccacatatattaaaaaaattaaattaaaaaaatcatgtcagtagagttgtttgtttgtagataaccacttctgtattgctggttagggtacaataaaggagctccgccatccggtggtgtcattctgatacaattgatgggaaatggctttttctgaatgttaacaaaaagtatagaacgtacatgctgctctcccctgtaatgccattcctgagaaggactgtatccagggcgagtctgaactgatgagtgagagttttctattgagctatttatgaccaactatgggaatcacaacatttctgatgatttttaaggacattgaaactgctgatgatactatgttaatcaaacagggtcacagaattgctagccatgcaatatcaagtgtataaaaatacagaaaaaccctaggggaattcactaaaactacctcctagatagtaattaggacaattattttctcctttatactgaatcataatttcaattttcctataaagctcattattttcctttatttaggaaggagaatttaattatttaaaagtaaattaattggcagccagatgctggtgaaattgtgcttgtcatagtacgtagttcgcaagaggtgcctcacaaatacttgggagaggaacaaaagaaacaaaaggaagaataaaggaaggaagaaggaacaaaatatccattatatcacgaagagctaagaattaagagatgtgactccctagtcattttcttagctgctggcactgatagaaacagggcactgcactcccaattgcttcattgagcaacactgcatttcagtatttcccaactgatgacaaatgagtcccactggatgtgcaatacagccagatgcagattcttcctgtcccacaacatcagagatgatctgtcttgagatgtgggacagcctgagccagttggcactcaaaaccaaaaggtctcttctggcctccggttacaacacagagatccacactatagttagggaacctggatgccaagaacttggagtggtctccagtttccctgtttgttgggatcttatctattggaactggcagtacaaagtatatagggttgaattggcactagttgggggtgctaacctgtatatgtaccactccaacagtttgaggtatgtacataaagtggtggtctcttggctcagccctcctcagtggctctgctctagacaggcaggagtccttgtcgttggttgtagatttagaatttcctggctgtggcttatgtttaatgccaaatctcaggacgaagacaagcaccaaaacaccaaactaaccccacctgaagtcttgagaatgttctgtgcttggaagtaatgagaaccttctagaaagcactcattcttacagttctgcctctgcagttgtttagattgggtctgggaatttcatgaaatccttttagtcaacacgctcaaaagaattctcatgaaaacacaaaagcattaattgacactttctctctcattctctcacgagtttgcagtagagagctctagatctgtgtgtgtggtgttgacccaacttgaatgcagatacagagagaaaaatccagtcatctctcaagccaggcgggaaagaggtagaaaacacagttgggaggatggcaagttctagtttgctgacttagctcatgcaaggccttgggtttgtctccaccctgtcattgcaaagaaaaagaaaaacctaaagaaattctgagataaaaaactttgagagccactgatctatgctaaaaagattttccgtcttcagttatagctgtagattagcctgagcctctcaacacaggaagaatctttccgagcggaaatcgtgggcacatttaacattttccacatgtgagttttatctgggtgttttttttttttttcctgctactttaaactcagacaattttatatccatgacattccatatcctacgttccagataagacttgaaaatgtctgtaaccttctttcctgctgccatttacaaactatcccatgaggtcaagttttccaactgcaaaacaagaaccatagctcaagagagcatggcaactaaactggaagctattcagtattgaaacactgtgcaaagcgtgtgctttgcatacagaatgcttattctggggaatgcttcaataggctggcaggcccttggtagaaaatgaaaatccactcttttgctaatatttatctgacctcttggatttagatatatgagatattaacatgttaataatagttgggttgttttttaaataagaactcctctggtagtctgatttacatatttaagaattgtgtgtggaagaagaaaaaagatcattatgtgtgtatatatgtgagggtgtgcctgaatgtgtatgtgcttctggagcacaatgttgatgtctggtatcatctattgaactccaccttatcatttgaggcaggacttttcaatgaacccagagctcatcaattggctggaatggttggccaacaatctccaaggtgttaaccgtctccaccttctaacacagggataacagaggtgtgtaaccatgcctggcttttatgtgagcaccagggatccaaactcagatccccatgcctgggcagcctgcacttacctactaagtcatctatctccccagtccctggttctcattttccctccctccctccctccctccttccctctctccttccctcttaagacaggactcaaatatctcagactaggatgtagttatacttgtgatgtaacagaggaagaccttgaagtttggatcctcctacttgttcttcctttttgctaggattaggggcctgtgccatcacacccagttttatgtattgctagtgatcaaacccagagcattgtacaagctagggaagcactataccaaaagaactatatgcctaggccctgccacttttctcaggtcatcctagcctgacattgtccttgaatggccacatataggcagacatttgctaaggttcagtcctcaattcttatgtctaccccactcctgttccttcaggatctcatccattatccaggttctgcctgctaacactgggcaggtactctcctgaatctataccatgaagttcatttctcaagacggctgacatttctcctgtgttcatcccaaacataccatcatttcactttgttattttgattttattctctccaagcccaacattgacagcactgatgcttttgcagttaaggctcaagtttgcctcggcagcctctcatagagtgctacacgctttatgatgtaattttaatgaatcttcataacagcatatatattaatcaagaaactgaaacctgaaggtcagccatttagtcaatacacctgtatcagttctctgtttttctgtgacacagagagtaaagggttgttttaggactggtatgacagacttggggccaaactcggagctaattttagggacctaaagaagtccccttgcttctcaggggtccattccaaaagtccagccccaggtccccagtaatattgtaaattccgttatgcaaaactatgggaaccaactctgaaataaccctgccaatcccccaaaggacctaagatgttgtttagtgtttggagaggcaaagtcccagatagtctgctgtgatgtggaattaactgtttcagaggagggtttgggccttttgctttgataccatatatctccttgatgctaggaagtttaaggactttatggtatttttgttagaaatctccagggtaggactgaagatataagcaggtcatccacacacataaaacaggcccagagtgtagatggagttctctgaagtcccttcctgagctcttgaaaataaatgaggactatttctgaatccctaagggcaacaccatctttgttgtctagtatggttggtatcaggatgatccccctccaaagggaaacaggaatagagagtcagggtgaggtggcattgagaaaaagacatttctgaagctcaggactaaaaaccacggggtactgactggaatttgacttaagaggaatgaggacttaggagcaggaagggggtgggtcttgggaatagaaggaggataagagaagatccagggatgagtatgaccataatacattttagacctgtatggagttgtcaaaaagtaaagttaagaaatagtgatagtgttattttttgtttgtgtgaagattcaataatacaacacatttaacatgttgattaagtggtaaactgtaacaaaccgtatgaaataacttatgacctttaaaaatatcattaagtgtgtctggacagtgtatttgtgtgtgtacaaatgtgtgtaagtgagtgtgtgagtcaatgcgaaagtacagctctcttctcagaggagatgtgagacagtttattctggagacaaatatgagtgaccatgacctggaaacacaaattcagcttaactcaaattccagattccaatgtggtaacagattgatgaaagttctttccaggaactttcattcctgtgtgcttgtatgtgtgtatgtatgtgtatgttgagtgtgtgggatatgtgtgtgtacatgtgtgtatggtgtatatgtgtgcatatatgtgtatgtatttgtgcatatagattgaggtcagaagggtgtcaatactcaccttcaaatttgtttaaagctgggactcttgttctctgtgtgtactctaggctagctggcctgggagcttccaggaattctctcacctcctcttccaatcttaccataagtgtgctggatttccgataccacactgggctttaacacaggttctgaagatctaaacttcggaacttttgcttgcatggaagcacattatccctggagtcatctctccagctcttgggcttgccttttgatgactattgtcatcttgacaattctgtttcctagtagaaactcccatactttattctcaaggagtaggatagtgctagggcacattaaaaacttgctggtctttaaacaagtggcctggccttcactacctgatcagttaggacacagaaatcatgctttgcattttagttcagacaaatattctctagctgccccagtctcacacaaacctaagaaatcctaataacgcaaaactacttcttaggaaaagattctagattaccagtattaaatgaaaaaataggctaaccatttcaaaacatttctttattaaatggttcactctcctcactaattgagggagagggaagaagttttatggttacttgcctttgaagttttgtttggcttttgtttttaagataggatctcatttggggctggagagatggctcagtagtaaagagcactggctgctcttgcagtggacccaggtctaattcccagagccacatggtggatcacaagccatttgtaactccagtccaggtcatttgacactctgcactgcactcacctgcatattttcttacacagacacatgcatagaaaagaaactttaataaacaaacaagtactattgcttaaaataagatcttacaaatgacatgttttatgaagaaacaacaaacatactataattgacagcaggtggacatcctgctttcattcattttttaaaaaagatttatttttattttattttgtggttttctcaaatatatgtttgtgtaccatgtgtatacttggtgcttgcagaggccagaaagaacatcagatcctctgaatctggacttaaaggtggttgtgagttaacatgtgggttctggttattgaacccagggcctctacaaaagcaacaagttttctaagtcaccaagtgttccctctctggctcccttctttctcttttaattgagcagcaaactgtaagatgactggcaggactccttattctaatagttgaaagagactgcagtacaatagctcattttaaaagtgtaaggatacagtatgtgtaagtatatggaaaattatgagaaagaactttactgtaaggaaattgtgaaacagttttagagatgaaaactgtctatgagtttcagcactaaagtatctagaaggaatattaacacagagataactgtcccatcgatgtacattcttgtacaaagcaatgaacaaaaactatctttcaggaattgagaaatggtttctatgagtcattgttgttggagcgtaggcagtcaatatatggtcaaactcatggatgtcctttggaagctgagtttcttggtgtgcattgtgacagaatctcctaaaggttctagaaacccaatgtcttgggatataagaccttcagaaattgttcttgagggcattttactccaggtccaaactctgaatgagtcaggcactcacttctgtttcttaagacagcagagatcttacacctgactgtaatgggttggaaggcagatgacttactgtacacctacctaagaggttaaatgagccaaggaaaacaaaagacaggaagtggtttagaataggcattttcaagtagagtcaccacttctttagagtatcagtcacgatcagtagttgtgatggaaagaaatggaggctagaactgccaaactccagaggggtctgagaaatcatcctggaatataatgcttctgtatccctgtctgggattgtgctacagtgctggcttggggaagacaccacacacaggaaccattattaagtacagtcactacaattagtacctccaatattgagccctgtctttggaaaccattttctacgggtgatttttcattgctgcctttctttcaagctggagcacttgttgcctttgttctaagattattttcttttcaaatgtatttacgtagacatagaaggaagatacagcatttctctacaaagcaagtgtgttacacccctgtaacacagacacctggcatccagatgtgtctacaaacccatcctcaccgctcccatcagagccatggtcaagatgggggataggtacaaattctcagattcattgtggcatacatagtgttttgacccacaagtattataacacctgccaccatttccaaggctgacttacttactaggctagaaccagtgaaacaaaccaaaacaaaagaaacttaaccctttcacatttctcagaatgtttgactacatttttgcctactgcttttagaaactggaaatagacactgaaaggcaaagggcacagcctccactctggagcctatgtctgaagtggaaaggaatctgaaaaccctttccccttgtggttgctttattttgctctgattcttaagctttcatttttgacagtttgggagtaggaaagtatccaaatgagtatttttcaggattgcagtcaaaacaagaggtaaaatgtctactttattagtaatctttttgtgtttctagaattgatagcatgtagggattttaaggactgtcaaagagatgtgtaataccccccagggacaggctttcaattccaggctcttagcagagctgtttgtgccaccaggaagacactcttaagtagtaattattctgctgttttttttttctacttggtggggggagggagggaggaggagggagggagagagagagagagagagagagagagagagagagagagagagagagagagagagagagagagagagagagagactccaggacaattagacctatgtagacagacagatgccagtttttcctgttatgtttctcaaatagtatggatccacaatgccacatatgactcagggttgagacgaggcgtgctctgaatgtgaccaagcccttgcatcaccttagagggaacagtcacctccacctggagaggcaagatggagggtgggaattctgtgagaggatggggagtgagtggttctgggggggggcagcagcactcagggaagagacttctagaaaacacttgagaactgactgtctaaatcctctgtcctaaaaaagggagggaagagagggtatttgtaatataaagacagtggatttatacagattataagttcagttaataatcctacagtgaataaatgtactggtgaaatcataacccagatcaagaaataaagtatttccaagtccctcaagttgaaattgaaattccctcaagtttccactaaggcatgttttttttttttttcttctagtctctaaagatttactgcttaatgtccaacatcattaatgactcaaagtacaacaccattagtttaccactttcaaattttatttttaaaacaggacacaagggatatagcttagtggtcgagaggcattcgtaagacccttggtttcaaaatgataatttgtacaagcagaattatatgcatatatcatcttgtattaggcttctttgctctgtatcttatttgtgtgccttatttatatttttatatctaaaatggatttttaaattcttactgttttgcagtgttcaatacatatgtattcattctggatttgaggggattctgattggttctaatatttgtctacagcaaacaacaatgcttgaatttttctgaaccttatagtgtgaacattttggtttgggattatacctaacatttgaatagtatgtttctaagtaattttctagagtaattatacgtctacacttccatgtgtaatggcagaaccctgtgggggatcaacttctgaagatgtgtgggatttcctgtgttgggtcaccagctcccttgtatagattgcttagttgtagggataggaagctgccccatgtcctagtgttagctaagtggcccctttatctttccgatggttcccaagccttatgttcccttactgctgatactcttcactgtggatctttaatggtcataattatgaaccaagggtcaaaattagattagattcaaaccaagttcaaaagctcatgggtaatgatatttaaaattttctaagaagacatatttgtatatttctaattttttacagtttctgagtcatgtatggacataggatagtaggaaaacagtgttttattatcttcttaaaagtatataataaaagtgtatatgaatagtgagattttaatactgtttgtctatttaatatcttaaacacaaaatgcaaaaatttcattcattacattcttatattgaaatatttattttgaaattttttcataaaatatatccaaagaaatatgaggcatgcagaatgtttaaatatatatatatatatattctatgatatgtatttaaatttatatttatttatttcattcatctcatatttattttatgaattaacaaagtattgttttatgggaatgaacacaattttctgagactggatcatgtactagggttgtaacgctgaaaagagaaatgctgcttgaaggtggtggcacatgcctttaattccagcatttgggaggcagaggcaggtggggaatccctgagttcaaggccagcctagtctacagagtgaattccaggaaacccattgctacagagagaaaccctgtctagaaaaacaaaacaaaaaggaggaatgatttatttagcccctacacagattaataagactataccaatagtaagatccctaaatagctcttgggccacagacggatggaaattgtaaggaggtatgacccagtcaaagggaaatccagatgtttcctaggctctctggatctctggcatgtctatgaaaatatatcattgaaagtcatgcaaacaagagcatgtgacccagtgtttagtatcctgaatataccatacaactaatacaactctaaacccaagggattagagaatcaggagttgcaaggatcatccagggtcaaccagttattctacccaagacacacctctttatcatgaaggaaggcttagcctgttcctgagtctacggagttcttaagttcttactggtttttctctgcttctaggagacattatatctgggaaaaaactctgaatatatgccacagtcatatccttatgcactggtggtctgagcattcagaggaaagttctctgtcagggaatcagtggtccctcaacattgaatgctctttacttggcaggtaaatctcaaatgaaggtgaagaagaagccaacagtcctgttagtctgctgtaggatggggcatgtgtgaaagccagccacatggttattcctgaagcagcacacagacacaggcacaggcacgggaggaatcattaccaactatttttggagacaatttcctatgtactccataattagacaccttaaattgttaactcatttgatgttttgttttactttttgtgagacaaagtcttttactatgtggttcaggttggcctcaaactgacaatcctcttatcttagctttctggtgctgggatgccaggcataaaccaccatgttcagcagcttattttattctatgactagtgtactttccagatggagacactgatgctcaagccaggaagagtgagtggtggtgcacacccatgattccagtgctcagggtgttgtgggaaactggatgttgaggaaccaagcaggcctcgagctggagaactcaggcttacttaatgctaatgggtttaagcttttaaagcacatgacagtagtttggctattttaggtgcatattagcagtaataaatgtatagcatatatttctttttctcctttaagaaggctgtggcaggggcatattcagttcaaagccagcctgagatacaccagaaaactctactttgaaaagcagaaaacaaagtgacaaaagacaataacaagaaaagggaaagtatgttcaaagatctgcagttgattgcctgagatgagcaagcttgtaaggacaaagtcaagatgactgctatgtcaggaaagactcttattttcagttaccatacaacgcttcttggttttgttttcaatagttgatcaggaaatgatttcggtatcagtttaaacaggtgtgagatcaatcatggtcccatcagtccaaaagcgatgaaagtaaagctgatgtagattggaattcacacggggtaccagatgagcatgctgaaattcatgacctaacctttgtaacagattgagctaaggttgaaagacccctgccccttagccctttctttctcaagtttgtttcctcttcctcctgttggcggcttccctgatccccacccccggcggcctccacttccctgccacccgccgcacgcccggccccagaacgagcaccaggtgggccggcctggagccctgcccctgagcccccgcccgatgagaaatactccgttccaaggtctccgcccccaaggtcagccatctggatgcggagggaggggaaattgagtctgttgtaccagacaccagaccttgagaatatgctgatctggaatggctctgtgtctcatttgaaccatccaatagaaatgattctgtatttcgcctcatttgaaagactctgtgtttcacctcatttgaataactctgtactttgcctcatttgaataaccctgtatagcgcctcatttacattgaccaatgggaatagctctgtacaatgcctcattagaattatccaatagaatccctgcttctagcttgtgcctttttccctatataaggacccctttcccttggctcggggcgcttggcctcacagaagctaagtcgcccgggtacccgtatctccaataaagcctcttgcggttttgcatccaagtccgtggtctcgctgattcctgggtgcgggtctccttctacgaaagtacctcttcgggggtctttcaaggtctcatgtggaacatcgtggtctccaaccccagactattgcttgttccattgttcacctgagcatggttcatcatccacagctgtgcctgcaaggctttccactttcccatctgagcataataactggccagctgctggtcctgccgttcagcagacaaggaagccttctgcggagcatctacctgttctgtgccatcaggagtcatggagggaagtgaagtccccaggaaagggccaggacaatgtacagaagatctgacatcagattctaatttatctggtcttcttaaaccactggcaaaaatgttgtttcctgctgtttgtgtctgtggctatcaggagagagctttgctctgagagagcctctgttgtgtagcagttttctcaggagagtaaaacctagggaggaagcttgttcagacacaggatgttaagggggaggtgaaacagccagatggtctgagaggagacgaaacttcccatcttgcagggaagtatcttcagctcaggaagtaaacaactcagtagtttcaggaaattgctgaaactggccagattcaccaggcccttccattcgggagcatatttaagacacagggactgactactgagagatccttccagacaaggtgagcttcctgaaagagccggatcagcctgggaaagatacctgctgagatgttcacgggatgtgaggtatactcaggtttcatgacgtgtcactcatgttcagtgttgcaactgactatgtgtcatttctgttcctgtaaataaccccttacccatatccctataagaagtcctatgttgcttagtttggcttttttggggaggtggggttaacttgacacaaactagagtcaccttggaagaaggaactcaattaaggaattgcctccctctgattggtctgtggattgtctgttttattgattgatggttgctgtgggaaagcctagctcactataggtaatatcacaccaaggcaaatagccccaggttatataagaaaggaagctaagcaagccataatgaagaagcttgttagtgacattacccaatggtgtctgcttcagttcctgccttgaatttgtgctctgacttccctcagtgacgcactgtgacctgggagttataagataaataaatcctttcctccctcagtttgcttttggtcatggaatttaccacagcagtaaaacacaaactaggacaaacccattggttcacctagttgggcttcagtggtatccatcctcacattggtttgtcatctgttccctatcgagtaagtagatatttgttcatgtctcccccaaagtagtgtcacaaaacagaagcattctaagtattacttatttctcagctatgacattggatggccagagttagtgatgagttagttggtctgattgacataaaaaaaaaaaaaaaaaaacgaagaagtacaaatcagaaatattactatggagtatcggtggtctagctgtgcttaggggaatacaatgagacatgattaagaaactatgaagccatcacagcagcagcagggagtctactggccaccaggtgtaaataaagcccattggggtaaaatgaacggcctgtcttctgggtagctggaccgcacagccatacagaggagtaccgcaggggtggaactgagcttgggtctgggctttgcctcttgctgactgttatcttgagaggataaatttacctcccagagactcagtttccttatcagtgagatgaagataataatagccacaatcgaatgggcttattgtcccaaaacactgaatgaggtcatgtgaattaagttcttaagctgcatcatgaatggtagcagttttcattatcatctcagggaattattatgtcgaaactacaaaaatttgtgatgtgcttggttcatggtggaaggttctggtacactaaaaataaaggaaagctattacttatagcaaggaaaggccaggtagttaaaaataacaccgaagaaatttattacacagcatgaaaaagtccagctcttggattgtgcaaagaagtggatcatgcacttgttcaggggcagaagaaaaagatcacatcttgtaatggttgaaaccgaagattctgaagctgggtatcctggccttcttttcttgtgttaccatttattctgtagccctgggcaagttgcttcaggtctctgtatctcagagtactcatcttttaaaaagatagcaagtacctcatatctaggattgctggcaatgtgaatggcgttaatacaagtaaagggcttggttattgcctgatacaacaaatgccatacatacatacatacacacatacatacacttcatgagccacctgtgtgtctgtgtatgtgcttaagggccaaaggacagcctcaaaagttgttcctaatatgccgtccacctcttttatttttgtcacaatcttttactgttttgaagttccctaaataggcaggctctctggccacccaccccagggatctgcccagctgcctctccaatgctaggattacaagcatctggcacaggtctttgtgtttgttttgctttgattttagtgtggattcagagaatccaacttgggtctttgtgcttttgaggcaagcacttggccagcagagctatacctctatccacacaggaaacttgtttctaatggtccttcctcttaatcattttagatataaagatacattctctatctatttaggtaaaggaaaaggaccagaatgcatcactccaaacatgccgtatttgtatgaagattattttaaactatagttttccagattccacagattcacaaggcatgaccatgtaaaacttggtaagtcagccaggtggcgcacgtctttaatcccagcactcgggaggcagaggcaggtggatctctgtgagttcgaaaccagcctggtctacaagagctagttccaggagagcctccaaaagccacagagaaaccttgtcttgaaaaaccaaaaaaaaaaaaaaaaaaaaaaccttggtaagtcttctgtcttctgactaaaggagccaactcctggaaaacaagagagctgctgtgcacagctattcaggatccatctgtttccagagaggaaatgacatctacccgaaatccctgctccagggagccttattggcaggaaagtgataaaacacattttcacaaacattacatcaattctcttgacagcccacttagctttccaaaaagccattcatttcccattagtgcccttttctctccagtccttaatgatccaaagcaactgttctcaacatatgggtctcgaccctttgggaggctgaatgaccctttcactagggtcacctaagactatcagaaaatatagatacttatttcatgattcataaaagtaggaaaattacagttataaaatagcaatggaaataattttatgattggggtcactaagaaccactggtctaaagtttccagttctagccatcctcaagttacttgttactgagatctcatatgtactctgtcatacagtaaatgaactgtcttatttttcttcctgcccattttcctcctcggggagcaatgtcatttacactgagaaggtacaaataaaaataggaaaaataacctaaaagagaatacagtagtgtcttggaaatgtagtaggttaaaatccattttctataacctgttgtgatttcactaatatcatatgggatcttggggctttatgcatggatccagatgagatcatagccttggctcaaagtcacccctccaaggctaagtgtccagagctgggcaagaagataatagacatcactcactgctcagtttcctttgttattggaagaagttttggaatcttaaactccagcacatttagacacaaatcccaaattacttttgaagccaggtactgttaagattatcattgggccatcccttccaggatttgctgtgagaaagagaaaaataaagattacctgcccaccccgcaagctgcccaatcctagttttaggtctccatggactagctcagagactgagtcattacctctgatgtgggtggagggattttcattttataagtactggggttattcagaggcttgttgcatgatgatgaggataatgctgataataataatgataaagggataaagacattgaaagttcttgcatttctccagtgtaagaaacattaaatattagttttttttcctgtcaaacactgaaacatttgcttaagacaaacaattcaaatcttttcacctttactgacttgtaagactttttatgaaaatcttttgatcttcataaccttaaactctttataaacgtgttttaattctactacctgataaaacattatttacacaaaggctccatgcattttctgaatttaagagcctcaccactttctcactttccttcgtttcctttgaaccaactcctaaaattattgggaaaaactctgaggctggaatctaactaatggggaaaagacaccgttgccaccttcaatagaaccaaagccaaatgcacttcctgcctctgtgtgcttactcgtcccattttgtgaatatcagaccctcttggttgagggtacagttttgccttgctgacataatttggatttgtttgtatgtcactttgtgggaaacccagatagaaacaaatctcaaaatacctatttaggtctggaaagaagactcagtaggtaaaaacatatctgttcaaacaaaacaaaaggagaagaccctttctcagcaactcccaagggttgtcctctgacctctacatgtaggttctgtgtggaaagaaacagctgttgtaggggaagctgtagccacgccttcttaggggctggctacaagagtacctgagggcttgtgagggcgtggtcagagtgagtagggggactgcgttttcggtttcggtttctctttgcttcttgctgtacagactaccaccggctggctggttcgctctgtaagtaaggcttttccctattaaatacccttatatttctacctgactccgtattggtaattacctactatatctggttgtcagaagcgggatattggaaacccacaccccatttgggacaggctgtgggttccatcgggcccgccgcctaggccgggaaagcaccctctttccacaggcattgccggctagcagctgacccacggcagctgtgctgctcagtcatccacccagtttctagctgcctagaggtgagtaagtttcggctttcagcagaggcttccccttgcggcagaacgggaaagccaaagctgaaaagccgtatactctctaagataagcgcagccgcttttgtaaggcgcagctgaaaagctgtatactctctaagataagcgcaggcgcttttgtgactgctctccactgctgaccgactgctgccaaacgcctcggaataactgaaggcctgtgctacctgctggtcaaatatatttactgcatctggagtagaaatcaggtaaaatcatggcggaatatttatcatttgctgaaattggtaatgtttttgcttattacgtgaattcactgtttgaggaggatgctaatttgccaattattggcctatatgctgtcatggcagtcagcttgctggtacaaatagtattactagccagaggactcaggaacagggacagaaataacctcaccacctgcttgcaggaaataacagctttacgcaatgaggttttggaaaacagattaggtcagaccacaattgtgcagcaagtggaacagaaattggatgataagcttggctctgtgtccaatacactaaagacagagctgtctgatgagatacagcgtatttatgataagataaacacagagagatcctccatgtctgaggccttagaggctaggctgtcagaagaccatgaccagctaaagaatatctgtagccagctagaaactcagataggcaatgttactcatcaactagacgcaacggtgcaaaatacccagcatagggttgaagaattggacaatgccattcaatcagttattgaagcatccaaggtaacagatcagaaatttgagtctagatttgaatgtttggaagataatttacagtacagggctgacagattacataggtccatacggtcgattgctgaggactcaaaatcagcaaatcatgacctggaatctagactccaatacctagaaggcagtttccatgccatccagatgctgtctaaggatgatcgtatgaaagacctagaaaaacgtgtagatgagcagttagagcaatttacagattcactaacgtgcttggaatcttttatgattaaggagattgaaacttttcaaaaggatatcattgctaggcttaaagatcagtgggatgcctcagaagcagaatcactccaatcccaggcacctactccacccaggtatcgtgactattcttctaaggttgttactcgtacaccattagtgtacccagctaccatggtagaaaagccagcttctaagaaacaccctcatggacgaatggtttatgaatggcaacctatacagccgaaggatcttaagaatattaaagaatcagttgtctcatatggtctccatagcccatacgtaaaacagctattacattcatgggcaacctttaacagggtgacacccacagattgggaactattggtaacagctgtacttgagaattcatgccaaatccagtggaaggcattggtaagggaagaggcaaagctccttgaacgtcagggcataaaggaaggttttgaagcccctctagataagcttcttggtcagggtatttatgctgacccacaggttcaggctgaatatgatgacgatatactgtctctttgcaggaaagcagcattaaatgcctgggataaggttcgtgagccaggagaacgtctagaagcttataccagaatagaacagggacctacagaacagttccaggacttcttacaaaggttaactagggcagtagaattacaggtaacagatccagaaacaagacaatcaattatatatacaatagcttatgaaaatgcaaaccctatatgcaaaagaatacttttgcctttaaagatcagatcagctccgttagaagaatgggttttgtatgcagccaacattgactataatgtgcaagatactggagcttgggtaggagaagccatctccaaaggtttaaaatggcaacaggaaattaaaagttctagaggtgaggatgtaagggcttggcaaggagaagcaccttacagaggtcaacataggtaccaagaggctagaggttactactactatgaaccagaaccttggggaggaagagccttccccttgagaccacgaatgcgccaggaacctagatgtttcaactgtggtaaaatgggacatactaagagaaattgtagacaaatgaattctaataatgcctcatatggaaggccactgccttctggattgtgtagaaggtgtggtaagggcagacactggaccaatgaatgtagatcgaccagggacatacaaggaaaccccttaaggtcgggaaaccccgaggggggcctcaagaaggcccccacatcgagaaaggtcaggtcatttccaatagcagtggaagacaatctctcacaggaacaatagacagttctttgcatattgtgaaaaaagatattgctctagatggtagtttgaatagtgatgaagaatcaagtgtgaatggacaaaatgagaaacgcatattttggcaagcttctattaatgataaaaggcctcagttaaaagttaaaattaataataaagttatttctggcttagtggacactggggcagatgtaactattattactcaaaagtcttggcctcagaaatggcctcttagagaggcaaatgtacaatttttaggaattggaactctatctagagttcgacagagtgttaactcagtggtctgcattggaccggaaggacagaaagggatactgaaatctctggggtcgtgatctcttacagcaatggatgctgacagacctccaatgggctactgctcttaactctgaaaaagctgattctgttattatacacctgctagaagtgatggcagttatgggtatacctgcacaaataaaaactgacaatgctccagcatatgtctctacgaaattggaacaatttttcaaatattataacataaagcatgttactggtataccacacaatcctacaggacaagcagtggttgagagatctaatagaacacttaaggagatgctcaacaaacaagcttggaagactaaaccccccaaacataggttgcataatgctttattaacactaaactttcttaatgccaatgaaaaaggacaaacagctgcagaaagacactggactacggaaaaaactgctgaactcaatcagccagtatacttcaaagatgtactaacctctgcatggaaaccaggacatgtattacgttggggtaggggttttgcattggtttctacaggagaagaaaaactttggataccatcaaagttgatcaagattcgactggaaaaggaaaaacctctcaacgaggacaaatgacaggtattctactaaggtatatcttataaactaaatagaaacctcccaaaggaaagggaagtgttttgcttttatcttcacaggaaaactcatcttcagaaggcaaaggacactgcatgggtagatacttaagaagacaaggtagctataaccatcaaatagaaggaatgtgccatacggtaaactttacagctgtctctcaaaaaactctatttctctttatttcctagtccctattcaattaaaccaatgctggacttagaggtggatttggctttcctcctctaaaatccaagcacattatttaactaagctttagtgtttctgtgttgtatcaagaagccaattgatgtaatacagaataaaagaagaatttggggactgtctttgtcttttcttggatctttctctcaaggtgtacaccctttcataattgttatgctctcatggttgcattccctagcatgtgtacatacacaagcaaacatttctctgctaactgttcatgtttgagtcccacacagccaatgaagacctgcctgacagcaatccctggacaccctggaaagaaaatgggccacagctcctcgactgcactggatccaacttgctccatttcagctgacactccggccagaggttcgggtactgacttcaatcaagttgaggatttcaagcgagatcttcaatcaagtgaatcccatctaacatggactggatactaacattttctttctacaggaccccacatgactatcatcgtcccatttcagcaggaagtaacttggaaaatgctacgccccctttccccattgttgtcacttaggatagtgtatatacctagttaggaatagcttcctattgtttatgactttagggtttagttaaaatagatagttatcttcttatattttacctttatactgttaagttttaatcctcttttagactaaaaggggaattgtaggggaagctgtagccacgccttcttaggggctggctacaagagtacctgagggcttgtgagggcgtggtcagagtgagtagggggactgcgttttcggtttcggtttctctttgcttcttgctgtacagactaccaccggctggctggttcgctctgtgagtaaggcttttccctattaaatacccttatatttctacctgactccgtattggtaattacctactataagctgtcttctcaaaagtataaaagatacgatttattctggaacaatatgagtaatcatggcctggtacatgcgttttggtgtccccaaaatacaagttacttatgtagaagcatttttataacaatgggacaaggagagttataaatcaaggctttcaaagtacattggtggaaacatcagagaggcaggagttacttcaaggtgggggaatctgtcctgtaaaatgatgacattcttagctttggacgaggggtaaactggtggtctgctaagttaatagatttcaagaggttttttttattattatttgttagctacatgatgttagtttggcatagaggtgctcaaagaatggctatctagggggcaaaagctagctcaagataaagggaaattaggctctggacctgcagcatcccaaccttttcacaagactcaaccagttgttataggcacatgagccaggtaaagatgtcaccaagaagttaggagggaaagtcctgagatgtttataaaaaagggtgattggttggcaagatggaaccagatgaggtcactacatgaaaggctcctgttcactaggtaaagcatagggcacctaggcacatgataggctgatctttaaaaccaatgactggctgttttccgatctgcggttttttgctttaaaagatgcttgctgtggggcaataaatgagttcctgcttgactagactccttgttgtgtctgattgtttgcaggacccttccttggacccagctcagccttctatggttgggctaagacccagcaccagaattcttgctcacagttcacacccatactgctctctcacacacaccctatacacacccacacagataaaaaattaaataaaaaatgcttaaaaatgaagatgtgtgttttattctgcaagtgtcatgtagatttcttatctgccatagtttcattagcctctttaaacttttcctcacacattgggctccagtcaggattgtagggatgaggaatgtaaagagagagagagagacagagacagagagagagagagagagagagagagagagagagagagagagattaaggacatctaagaaagcttctttggttcatacttggcaatcccggcactcactcactcggaaggtccatttgtgaattcaagggtaacctgagctagagttaagactctgtgtcaaatcaaccaatcaattaatcaattggttaaaagaaaaagaaaatctctatgagtgagaaggctaagctccttataaaatggaggtcatagaccaagaactggctttaatactttagatgcttcattgctcagcactgtgaaagcagtgttttgaatgtaataaaatgttttattacgagtcagtgaataggtttgttcacttgctttgatgaattaatgagtagtaaaggaaaacaaatggcctgttgatttgatagaatgattcaggatactacttcctgctctgtggtgagtggttggttgagaagatctgggctttgccaaggattgaaagtagatcagcttcaaaagagcaaggataggaacctgggcaatttagaactactatccatgatttaccaagccaagttttaaaaagcagacctctttctccccaagtccctaggtaattctttatcttaaagtaagctaaaagtaacaatgtacacaataaacagccctacaaggccattgaattacattatcccctttcagatgtaaagtgcaacagaaataaagaaaagttatcatgaaacaaatacagtaggcagctttctcttccccttgtctggtaaactcacactgagtaccaggacttgtctcatgctgtgaaattcactttcctaggaaacagacttacagtatcagttattcggctaattcttgagccaccagaggaggagtagaatttgtggagtagctaactgtctccagaaacctccatccagaaaaaaaaaaaagaccaaaaacagagttacttcctagttttgtctatcaaagatcaaaaatagagttacttcctagttttgtctatatctatctatctatctatctatctatctatctatctacctacctatcttattatttatttttttagtgtttttgagacagactcttaagtagctcaggatggccttgaacccttgattttcctgcctcagtctcccaagtgctgggattctaggtgtgagccacagtacctggcttctttttctttctaaaccaagaaatgtaagtgaaatttcttgtctcagatcctttgacatctcacaaactaggatatacaaatcataaactccagtgacagagacctttgaatatggcatgtcctcctagtttttcccttagagcacatgatcataattgatgttgtgaataaacacaagattgtgacccaaaataaaacacaccacaggattaagtattgcttaagtgctaaacaatgatgtgacctactttatatttaaacaaacaagtttgatatttcctgatttaagagctggttgacaacagctaattttccattttcctaaatttcttatttactggaaaattttgaaataatttaaagattgtcaagattttttaaattggaagtgtttgaaatattacattaaaatgtagactagcagggaccttccagtcgacttccagtggacctaggttcaattcccagtacccacatggcagttaataactgtctgtaattccaagatctgacaccctcacacagacatacatgcaagcagaacaccaatgtacatagaataaataaattaaaataaataaaatgaaaaaaaatctagaccagcactgatgagtggcttagtagaaacagcctgggagcctcataataatattaaccttgtttgagttgcaaacagaaataacatttaaattgggatattttttataaattcttacagtaaagaaaaacaagaaaaaggcaaatagtaaaggctaacctggctggaaatggccagatgcattatctaactagagacttttcccacaggacaaacaatatggtagctgtataattgcaaccaatggctgctacaattacatctctctgtgtgctgcaggaaaatcttcccctgtaatgccctccaagacctccttgaaccatttctgatttgtagctgttcatcttaggaagcactgtttgcatagatgatctatgcctcatttttctgtagtattgagatttcagcctgatgggggacgtccttctgtatgctgtgaatatgtttctcttattggttgatgaatcaagctgttttggccaatggacaggcaggatgtaaccaggcaggaagtataggaagagctaccagactaggagaattctgggagaaggaacagagagagagggttgccagggagatgcacgtagctaccaggaagttagaatgtctaggcgttctctagtaggccaagaccacatggaaatacttagattaatagaacgggtttataattaacagaaagctagccaataagaaacctaagccaaatagtttataattaatataagccgtatcctgaacattgcataggatgacctcagttcactctgcacctgagtaaggctggctttgaacttactattctgtcttagtctccagagaacctgggcttacttgcatgtaccatcaggctcagtgtttaaatgaagtctttaaaatggcattgtgtctcagtttttttttttaaaatttatttatttttatgtgcatttggtgttttgcctgcatttatgtctgtgtgagggtgcctgatcctctggaactggagttacaaacagttgtaagctgccatgtgagggctgggaattgaatccaggtcctctgggagaacagtcagtgctcttaacagctgagccatttctccagcccctcagttttctttgtaaatcagtttttatttttgtactttgtcctctggattctatacttaatttttagttaaaagacaaaatatagatcatccataaaaaaagagatttgtagaaagaagtagtcctgtattcaccgtgacacagtagccagattaaactttactatgaataatttttgatctccacattccagcacttaatctcttccattggaagtcattagacaatgttggagaacttgtgaaaaacccgagtctctgtgagcactctactaaacctctcttgggatgtctgtaccacacagcttacaggagcctgccttccctcagggggagatggttgctgggcagccaggttgtcctcttttatagataggaccagttggaagcttctaacttagtgttggatacagacatcatttcttggcagaaagtgtttctggaaattttttttctcatgtgactttgtactaaagggctcagtttgacaaagtgaaccccacatgcttctgtaatagttaagattttagcagactttatgatgaggtcagttttctgttttgtattctaatgccatcactgttcatgcccttgttcttcacctctaacccactcattggcttagacctcagttgttctacctgaccaccgttgtggactagacagatgttgcagtgatgagctgtcttgtgctacgggatgctcagcaatgtctttggcctccacctgctatacagcaacctccaaggccccaggtatgacatcaaagcatcctcaggaattgccaaatgtccttaatttttagtgaaacaatgcagtaccttttagtataacatgttccatgcaatttcagaaacagttgaagtttaaattcaattcaaccaatctggtagttttacaaattgtagtggagcaactgactttttattgtttttgtttcagagttaatcctacattgaagcagttactttttcatggttataataaaatgtatacatttcctttcaaactggatgacatcaacaaggcatggtgaaatagaaaatcacttaaataaacctttaatgttcactcagggaggaaagcttggatgaagagactgcagcaaccttggcaatagggcaggggagtgaggaattctttcttcatgaattagttggaagaatctacaaggagttgttaccaggttacaaaagatttgcttcagagaatgaatatcccagtggagacagggtgaatgtttttctttaagcgaaggataagatgcttaaacatttaggaaacaaaagagagaaacatagaagctacaaaatgcgtccttacagggttaagaaggtttgcttcagagattgccctttccagtagaaaaatggtgaatgaagatgcttaagtgaattaggaaacaaacaaacaaaaaataccaaaatcaaaccacactgaagaggaagtcaactgcaatcttggtgagtattgaaggcatctgtttcctctaagaattaagtaattcttaaactcttgggaggctgctttcaatggcaacttcagagcagaggtatataattcttctaatgacaatcattaagataattcaaaaggctaagaatatagttcagtgatagaatacttgcctagcacacatgaagcgctggcttggatttgctggtactgcagaaataaacaaaacccctcttttttcaagttgtaatatgttggtcaatggaatcaatgagttttcctaaataggtacaggaaccgagccctttgacctttaaaaatcctcagatgtttgggaaaaccatatcaaccagtttgagattgttgcactgtctcttacatgggtgtgtaggagagtgtagaaagagccctttaattctggaaaaacccaaagcagtacctttaagagaaaatgtgaataattgttactatacacaacatataaaatgtttacaatatttaagggatttggcatattagcatgcttgacaaaataattaatgagtcaatttttagatgtgtaattgattttagaaacaatattgagccatttacaacaattcaggaatttttcatgtgtcataagcatattatataagaaacatttgtatttttctacaatgttgtttttcattataacaaaaaattcacaagatagatcggttttattggcatcaatttgccaagaagttcccctttccatgagacaagcacagatgctcttactccaaactttttttttactttttaaaattaatttttatttaaattaaaaacaaacttattttacatactgttctcagttccctctccctcctatcctcccatccccccaccatctccccatcccaacccccatccaggcctcagggaggggaggcctcctgtgggggatcatcaaagtctgccacatcatttgggataagacctaggccctctccagtgtatctgtcttgattactgacccgtccctcgggtcagtcattcagggttccaaaggggggctgcctgaaagagtcacgggcgagagaaggaaggagaccaagaggcacaaaagaggggaccagagtccatctgtgcaattgtcaaggtctctccttattggggttcagagtgggtttatatagccctgcaacaaggaaattaggcaggcgggggatagcaggaaggaacatctggtatttgctggggctggtagattcttgcagtatcttcgaaacagcaggcagaaaggcccacgccttttctcgcaacgcagtcgttatcaatcctgcttggccaaacttatctaattataggtcacatgaggctcacagagtcggctttaagccgcaaacttaaagatcataaaaggacttacaaagatgggcttttaaaccccatagtttagggtccatggcccttaacagattactactactcactctcagatcacacattctatgtgacacatgtatctctgccatccaagagtctgtgcaggaataaggaagcagtcattcggctggagacactgcggctgctgtggtggtggtggtattggtagacacaggctgcagggtgagagcggagcttcagaaatgagacttgggatctggaccacagtggctggcgggagaaaggaagggccaggagatggatggatagaaatttgaggttgcctgcatcgaggatagagactgaactgagcggaagtctcggggcagtcctgagttctcatcccatggtctgttgatgaacatggcagaaggtcagatgaatggtctgaccatgtgagagagaccatgtgagagagttgcttccattccgcagtttgaagtgtctgctaagtcctcagcctcatcttcctgccatgatctcgatatgcccaggtgcttctgcagtcccatctttcctccttttaggaataagctacttatcagcctgcacctctcaggtggaattggatgaatggtgttgcttatgtgtccagcaacatgaacagtcaatcgccgttctcacagtggaatcacgtgttgcatgtaaaatgaagtctcttgggcaaggtagtcttacacaactcaaatgaactaacagtggggcgctggctggtctccccaacgccataataagggagtagactagtgaccactgcaaactgggaaggtgttggtggggatggaggaggttgagtaaccagtatcataatagagttagagaaggagtcatccttagtgttccacagtacctgagtgacttgttatggattttattcctataaagaagtagcagagaggactttgaaggttctcaacacacaggaattacagtgaaaccagtggagatgctaattactcttatttgaccttatatataatccttgttttgaattatcacatagtactgcatgtcaatgtatgtaactaccacatgccagttaaaattacattaataagttaagtttgatttattagcaaccttataggactccttaagtggccagggacaggtatcacttgctagcaatgagttgtgaggaacttggggattatttgtacaactagaccccagaactctcactaatgtgttggttgaccataatgaccactgaatgctagatttcagttaagaaatttcctaaacacagtgtcctattttgaactcttcctgctagtctgagaaattcctcctcccaactccccacctttgtttccttctttatcagaggcctccactggcctagtacacatgactcagaaaccggttcccctggctgtaataatgatacagctccggcatcattactggtaagccaatgcctttgcttcaccagccggtctctctacaaggtgtgttgctgtcacagaagactgggaaagcactcccaggtgtggaatgagagggctcgccaccgccttggacttccagggacttttctttccgggaagaaatttaatgttaattaaaaacgcctccagaagattcactgccgtactgtagagggggagcaaacccaggaaggaccggcatgggaatcctatattctgaggtatgtcctatttctgaacacaaggaaacaaaggggctaaaaaattgctcgtatttttcacacataattttctatccctgttattatgtcttttcaattctgtttaactttccttgtgagtattaagtcaggaaaggtcctgtgtgctaggatatttagtattttgtaatattttaacacaagttagtttaaaacactaaagttttagctagacctgagttgagtgtgatgaaatatatatttcctgacatcctaattgcaaaggttatccgaaccttgaaaaatagagttgcagctatgttgtgtcttggttaacatgggagggcaagagaaacttgtacctaactgggttttctaaaaatccccaaattggcaggcttttccatggaaaccatgaatagagtaacacctttaagcttgttatgtgaaagggagttcacctctggcaattattaatacagattatcaccatatagaagaggtgacaggcagtacagctttggtattttgattatttccttttcatagctaatagacatgatattttcccacattgaaagttacttactacaaacaaatacatttgtaatatttcaaaggatgatgtttaaacaagagtatcagaggcactataatgttactattattactattattattattattattattatttttattattcaagacttactccctctctgacacaattaacttgctaacctgcattccattctccaagctcaggggaacctctttgactttgatcttctagtagttgtttggcacctactttaaatgtgcatgtgtgagcatgaatgtgagtgtgtgagcatgagtgtatgaatgtgagtgtaggtgtgtgtgtttcttgactaaatgcacaatttgtacatctccccattctgggaatgtcttactcattgattttgatctcaccaagaaatcacatatatatgaggatggcaaaatactctacatactaaggttccactctgctaagttatttaagtgtcagcaagagaaatttgtttgtagtgaagtttctaggacagccactccagagttctgatttagctcatgcatggttcagaaaactagctttgaaggggggaatcccagatgactctgggcggtgtgactagctcactactgtcctgagaggcagaagtcttgctcaagggggggtaactttcagactcttatttgcatggagataaccccagtcttgttcgaatgcaggttaagatcatgtgtttgaccctctaattccgtgtatggtcctttaaattgtactgtgagtagcctggctcatgcaaacagctgggtttgtaagtgtctagcagtgtgattgcttgtcagtttagtgttgatttgtcaagcagttgagtcaagacaagtacaggccaggtcaggcatgtttaactacttccaagaagaagtgagaatacttcccaaagcgacatgaatgtttaactcttcagccatcttaaggacaaaatgaatcagagttttctttttactgtcctgttgcaattttattttaaagaaagatttatttagttcactgtcaaaggaatatattaacatgatatttcctatgaaatctaaagcatgctggtatacaaataccatgaaaggatctcatagtaattttacagactcgagattagtgtttattaatgtgtggcgtatgcttgaaacaaatactgctgctgttttgcaaggggaggcagcttttaggcccttccctgttatttttctcagaagtatgtttcaggattggcaatctgaagctctcgaatcactaaagaaatcttaatcactgcagaaatatggtgtttttgtttttggcaaatgctttcacagcttgcagaatctccctttgatgtcagggggaaaatttccatttgataccagggttggggatgtaactcggttgaatagtcctctgctagcatgagtatacaagctgtaatgctctgttattattcacttccattatggaagttgttttgctcaccttgcagggttcctccacatgcctgtgtgtcaacatctagagaactttgagacagacacagtgctttcagcagattcccaaatattctgaactaatgggtcaatagtgggaccagagccatgttttaaaatgtcacaatacttaaccagggtttataatcacgagttcaaacactgatctagttctcacacattttattagtttctaaacttcaacaacctcttctcctaaccgtcacttttcagtcaggttaagtgggtcttcagtcaagaagggattttcatccatgttctaggcacacacccctacagaagtctacttttaggaaagcagccgtctagttaaagagactcaactatctccattggagaagggcctgggagctacttatgaatctgggcatttgttgtgcagtagaagaatgctgaagggttttctgtgaaatgagcctgagggggagaaacagcacagtctgaaaggcaaaaagataatgaggtggtaacccagaagtagcagggatggcctaatgaagacatgagttcacgaagaagggcagtgttctacacactggctcacccagagactctggcaactaaaaaagatgtatgtcttgggtacttcactctcctggaagcaggggaaaatgcctgctttctataatgatacatgtaattcaaaagaataaagcaaggtgatgtgactgcaagtgggctgggaaatgatgctttaggcgcagaggtcaagaatccctcttgtggcttacccatgttgctgacactgccagacagccttatagatcccaagaaatgtgaagacctgaaaaaaggtacgaatacagaatattcaagaacagctggaatgttgtaaacaaggagaggagaagtggatgtgtttaagggaaaactcagcttaggttccattattttttcaactgtgcagaacatggttgtagttagtgccatccacaggctacaggccaggctgtgtgagcccagaacataagcatactgttagcaaatatttctcctcttcctcatctactagtgtatcttttatcttcttttgtggctttcactaggcatcaccatattctcatgtagccactgtttctgccccttctgggctcaccattgcatatatatatatatatatatatatatatatatatatatatatatgtaaatatattcatatatatttatatgaatatatgatcagtttcttgacctcttttgtttatgatcctttctctacctttgtgtcatttttcttggacactccaaatctacttccaaattctcaaaacacaatttcacatttctttctgttctctgaaccgtgacattaaaatcaacaagaagtcttctttttcctttttggcctctatcttggcacccagtctgtctcagtatggctattcaaattttctttcttggacaaagttcattggtaatttctcttgacataattgagtgtgtgtgtaagaaacatcccaagtgcaacagatgtcagggaggaggcatcccaaacatcgcaaacagcagcagagtctgaggaagaaagacatttactcagagagaggatacaggtacatgcagcagacagaggcagcagacagactctctgttaagccagggttgggggtggcggtcggggaagcttgaggacaattacggggagggggatactgggggggcagtggacggtgggcggtggacaacacatggagcaagggaggcggggcagcttgggaagccaagaatccagtcccttctcaactgcagggttttttgaagtctctgaagatggctgattggcccacaacggttgtgtaacaaatcctgatccggctctgaacttgttgagccaggccacagcaggcagttttgctacacatccttgttttaagctgtcaggcttttgtctcagatcagaagggtgaggaggaagtcagccatcttggaaatttgccacctttataacttagccatcggcgctttacctgtctttctgcctagcagggaatccatctagctcctagtctcttagttcttaaggtcaatattaattttggtctgtctcaaagggatgcacaaagtagatttctccattgtttaaatttggcttcatggtttcctagcatgggcaccttgctctcgccaatcttcctgctagaccacgtgtctaactttgctctcatcccctctgctggtttctttctttcaagtccacccttgtccatattgccaatttatgtgtgaggtggtaaaacagcactctcccagatgacagacaggtttcccaacttttgctctgggctccttcgctccacccttctcaaaccatagatttgctgaagaaactgccacaccagctcagccagctgtcgtttatgactgcgattccacaattgatgattaaagccattccatgttttcattcagtccaaacagacaacatacaccagtcattagaatgcaccaattccccaccccatgtttcaggagtctcttctacccttgtctccaccccatctcctatgtcattaacccattcatctaggtaaacatcaatgttattcctttgcctaactatgtttaccaatctatatacttatgacaaatacctattaaaataatgtgtggtgaccaaaccagattgttctggcaaaaaaatatttcagccaacctacagttctctctactgagtttatctgtcctttctccatagctttggccttggagccagaattttccttctgggtcatcatctaatcctttctgccctgtcctgttatttctgcactctctttcagcaatcaccccctatttcataaccacttctgcccatcttaattggatccttatgcttcaataattagaaaagtatccagcactaattgagggttgcagatgagtcagccctgaacaaaatgcttcgtccacacaatcaggtttaattcttaatatagcattatgcagaaggaacagttagtggatggaggaaactcagcacacgtgtttaaagtgttcaggtgaactttccaaataacacctctgctaagtgggagagtgaagattagaacacaggacgttcacatccaaagcactgtttctcaccaaaatgtgcagaattctggttgggccatatgtactacaaactcactaggtttactggctgttctccctgctatagttactgtaactccctctccctgattctagttgttcaaagacagttcctgtcctgtcatatgaaactgatgattgcataaagcttatcatatctggattgttctaaatcatccctttttcttgagactttcgtattttgctattaggttgtgtctcttttgtgtctctttcaggtttctactacagggtattttttgtttatttgtttgtttgtttgtttttgttgtgtttatcaggatctctttgtctagctaagatgacctcaaatttattatggaatctagtctggctttaactcttgctcttcctgcttctgtatcctgagtcttgggattacaggcagctgcctccatacccagcatttctttttacctcagatattgctaattctaggtcagttttgggaaatcatttgaatatatagccaaacacttgcaggccagtggcatgagaagactgatgagaatactgaggatgtaaactatagattactgatgacagcaagtcttgcagccagagaaatacttgaggtgaaagtatctagaggcagaatggatgacagttacgctccatgagtttggctcatgtctctatcccttatgagctatgtgacttgggataaggagataatctaccctagttccacctgtgtgtagtgagtataaaaaacaatacttaccttatagggtagttttggggactttgggaatagctgaggcattccataaatgtttcttcattttagaaatcactcattggtttatttactcatgaagtatatgttgcatggctatggggtatcgcacgctgtgctgggagctggaatgcaatgagaatgagaaagtgtagacaacaataagtgctcttttgtttctgacaggccagttggagaaagatgactgccaataacaccgatggtctgtttttaggtgatgtgggaattacagatcagcaatttataatgtattgactcaccattagataaagagagaagtgtaagattgtgggtcagaacttggtgagggttccattgtacttggttaggattccattgttccatggaagaaaggcaaaaatagggtggccagggaacaaaccagaagcagacttatccttttaaaatataaggaatccactgccaaataagcaatgcattcatgagaatcgtatcctagagatcccaaaacctggtatttgtgcccatcacacagcatcaccacactgggtatcttagggtttctattgctgtgaagagacaccatgactatagcaattcttataaagaaaaaacatttacttgtggtggcttgcttacagtttcagaggctcagtccattgtcatcatggtggagagcatggtggcgtgtaggcagatgtggtgctggagaaataactgagagtcctacatcctgcaggcaacaggaagttgactgtgatgctcagtggtatcctgagtgtaggaactctcaaagctcgcccctgcagtgacacacttcctccaacaaggccatacccactccaacaaagccacacctcttaatagtgccactccctatgagattataggggccaattaccttcaaactgccacactggggatcatatttctaatacagaaactgtgaaggatacattgaaaccatagcaaacatgatttgtgtacttggaccaaaaggttgtgtaggggttgttagaaagacaggatttgtaagaaccgagaagcacctgtatctagttaaggatggcatcctgatccaattggtcatggtggagggtcttcagcaggaatgtgatgagtagctacgggtggggaggatgaacaggagaatgggtaggtgagacgcagagaggtaacacagtcacaggcagagagcaatgaggatctgagccctgaatgagccctgaagcgttggtgctaggcatacagagaattttagttttagaggtaattttccaggtgtgactactgtaatctaaagcacctctagttccatgaacctcaataatccagaacagcttttctgcccaaatggatgccttcctcttcttgtttactttctactttgttagaactttattttatttttttaacctaccataaactgcatatttaagaagtacagtaggaaacattgactattgagcaatgaatagtgaccaaatcagggtgtctactccatctctacacatttatcatttctttatgttgggaatctccgaagccctcttttctatttacttttaaaatgtataacaaattgttcagaactgtagccacccttcaatgccgtagaacactagcaggtactgacaggccactactactgccctggtggaatgctctccactgcctgtgtgcttttctgacactgagctgcctcctactggaaacagtgtaaaacagcagggagttgtttccaccagaagtgttttccaccagaagttactgttgtttatccccgtggtgtaaaatgcctttgggtaggcaagaaacaagcggaaactgtaagttcagcaagggaggctcactcatggagagatctcagttgggaaccccaggggagggcctcagctttcacagttgattttggctggacgattgcaagcctacaatttgacagcgtgaccttggtctgttctttcaatcaacccacttcagtcatctcagatgtgaaggcctgacttcatctttgctatctacactctgcttctatctggtacttgcatacttgttctttttcttttgttcattacatgcttcataaactgactcattggaaaccaaacagaaccatacacaacagtgagtgtcttagtcactgtgttattgttgtggagagacagcatgccggtgacaactcttgtaaaagaaaagatttaagtaggggtggcttacagtttcagagggccagtccattatcgtcatggcagttgcatggctctggggtagtagctgagagctacatcgtgatatgtaggcagtaggtagagagagaaactctcaaagccattgccagtgatacagctctttcaacagggccatacctcgaaagttccaatctactggaaaagcctgatgacttagactcaattcaaattaagattaaaagaattaattcttactcctagcagaaggacagcagccttagagccaaacatcatgccatacctaaattaaatgaatttattgttattgccagcagaaggacagaaccttagagcaagtcatgccctacctaagcgggctaaagggagggttataaaggtgaatagcaaagatgtactttacaattatctctgaaattcacacctgcacaagagaatggttttactcccctcagttgtttctctttctgcttgtatagtaataaaaagaccacaccatcccatttccactgcaaaagcaagcagttaaacagcaagtatacagaagcagaaaacaagcagttaggaaccctagtcttatgtcacttgcaggccactaggatctctcaggtgtttcagggcccttagggatgcctggtaccatattaagtttctttagccatcatggggggagttatgtgtaaattattacacagatctgagcactctggagggagtgtcactaaatgactggcatagagcaggcaataacagtgtcatcagattaggactctctgtcacttccccacaacacctgttcaagaaaggccacacctcctaattcttgtaaacagttcatcaactagtgactaagcattcaaatatatgaacctatggaagccattcctattcaaaccatcacagtgatttatttattttttgtacacacacacacacacacacacacacacacacacaaatgaacccagggttttgcatgcattcagcatcagctctaacactgggctacccttggcctctcatactttacttttcaaaaaacagaaactgtgttcagattgcaggaagcataggagcgtctaaagttaagatcaggccatatttaagtaatattccctgtgcagagtgagaaagtcaccagtaattctcactcaaggtcattagccatctcttggtctttctctttttagttttactcagtaaaaaatttaaagaatccaagaagtgtggtgatatgttatttatgattcattaaagcttgcctgagcattcagagagcaaagttagccacaagctatagagatgaggcagttgtggtacctttaatcccacaacttgggaggtaggggtagacagacctctgttagttcaaggctacactgagctacacaaaatatatccagtcctaaagagaaacagctcacacaaagatgacctcagcacttgggatcacactcctttaatctcaggattcatgagaggtatttaagacagaaataggctctcagaactggcattcattccccagtcacattgaggataggaagacattgaagtctcaggattctccagccacacagaggagaggcagtagtctgaggcttgatgagagctcgtggagataggatcagccatttcagcctgaggcagtggccagctgctttgcatttctgatcttcagcttgaaccccaataccagtctctgggttcttttactttttgtgttacaaagaaaaggggttttgatcttggaagtaaaagccagataggccatggatggttgaaatggactaggtgtggtgtaatggggagttgtgggactgtggagaactggaaacaactgccactaaccaccagttagctggtgtcctatatggaatatggttcagcattatgaaacctataacaatttaaagagaagcaagaaggtaaactattgtaaactggtttaaatattggacaagagattataccttcaaagttacctactcccaggctcttcagagcagacccagttctccagaggcacagagccaatagaatacacacataattttaaggagatttttattacattagtttacacaatcagaggctaacaaatcccacaatggcaacttgtagtctgcagatcctgggaggccagagccaataaagcacaaggaatttgacaccagcaaacaaaaacaaaaaagggagaatcaatgacatagccgcagaggagacaagggcctagaccctggagagacactgtggtaatctgcaaccaaaggcagaagagtctggagtccgtcatttgttttttatatttgcttatttttgtgtgtgcacttgcatgcttatgctacagtgcacaagtagagtcagaggacaacttgcagaagtccgttctctacttctttcttgtgggttcctaggttagaactcagatcatcaagattggtggaaagtgccttcacccaatgcagagaaagtcacatagattttttattaaccactgttgccctgaactctttccttccccaatacagtctgctttagccagattttgctttttttttttttctgaaaatctctttaattttcagtcatgatataaaaacttccttagtgaatgagattcacagtatttcacccatttatttactcattcattcacttctcttctgcctgttccatgtggcaagcaattttgggaaaggtaaacagatcttcatgaacatatcctagacttagaatagtgggatttttttagtttgtttgtttgtttgttttttgtttttgttattctcggtggttcatccctgtatttcaagaactgttctgctctccttgactcagcccatctgccaggcagcctaccagaatgacttggggcaggtgtggcggtgggtaaaagaagacaatcgttatgtggatgttcaagatggcttcaacggagacactccgctcatctgtgcctgcaggcgaggacacgtgagaattgtctccttccttttgagaagaaatgctgatgtcaacctcaaaaacttggtgagtttgctgtgtgatgatgttctaatagaaatggcatagtatccatcctgcaatttctagagccataactcagaaaaaatcatgggaacattctggaatgtgtctttagccaaacattttatccttatagatatatttataaactatatacagcaaaaaaagatggtatgactataataagcagtgtagcttgtcttatattatctgatatctgccaaaagaagaacaaatcaaataagttaaaataagtaagtaagcaaaccaaagcaagcaaacagaacccagggaagctatgacggggctgtgacagaaggggagagcgtaactgtgaagattctcctcaaatgctggaattgtgagggttggtttttcttcttatagcttctaaataccaatgattctcttttgcctgctagcattttgctagactgaaagcacaaataaagcatttcacccagcagggatgtctggtggtgaggtcattgtgcctctgaagaagaggatggtgtactctattggttgtaggcaacctctccctttcctgttctgcttcctccaactggtcttgtcttcttgctctcttcagtattgcagaaataatgggggggggtgacaggagacactgcctgtcattatttaggtttttacctgttgttttaatataggttgtatttttttttcactgacacatgttcactcacttggttttgggttacattttcattcaagtctgttctgtacttggaacatattctccatcctccttatcttctccttcctctcttttgttccccaagacagttttgcttctattttcatcttaaatatttgtatgtgactgtaagtatctttataaagtctacaaccccccaatgaaagaaaatgggatgtttctccatgactgacttagttcacttcacctgactatctccagttgcacccatttttcctgtaaatgatatgacttcatttttccttcatagctaaaaatttctgttatgcctacgtaccacatttggctcatctactcctctggtgatgggcatttcatttagccttataacttagctatcttgaagtgtgctgctgtaaatatgttgcgcaagtgttgtatctgtgatgatttcgaggtgatacccaggagtggtgtagctggaccatgtggtagatatgttttttcatgtgtgtgttttgaggcaccgccgtactgacttcccacagcggctggactaggtacattcccacactagattagggttcctttttgcttacattcttgctagtatgtgttgttacttacttgtattcctaaggactgctgttttgacagggatggataggatattaatagaattttaatttgcatttctcttatggctagtgactttcatcttttccttttttttgttaaacatttataaatcaccttttgagaacagtctgtcttttcattttctcctttattgagtggtttgatttcttgtcagtttggttttgttgttctttgtgaattctaggtattaatcttctgtcagttgtagagttggaaaaaaaacactcttttattttgtagaatgcatcttcacttgacccattacttcctctgcatacagaagtgtttttattccaggagttctcacttgtcagttgttgtcattagttctcacacaaccagaatcatattcagagagtctacgcctatgtctacatcttgaagtgttttccctactttaccactacagtttcagagtattatgatatgaatgcttttgcattaagatgtttgtcctctttggacttcatttttgtacagtgtgaaagatggggatgtagatttgttcttctacatgtggacattcaattttactggaaccatttgttgaagaggctgttctcccttgttctcttctgtctgtgtgtcttcacacagcctctacctcaccaacttctttgtctccagcaggttttatagtaacatctttaggttaaccaagcactcttataggctcttctggagaccaaggcattgcaacaggaagtatctgactctgactactggaagatggtgggttgtaggggaagctgtagccacgcctacttaggggctggctacaggtgtgcctgaccatgcttgtgagggcgtggtcagagtgatgtagtgtgactgcatttgcgctttcggtttcactttgcttcttgctgtacagactgctaccacgatggctggctaggtcgctctgtaagtaaggcttttccctattaaatacccttatatttctacctgactccgtattggtaatttcccactatagtgggtgacatacaagagtggtccactagaatctctagggagtgaaccagggaatgatggattactgctgtcaaatataggtggttggggccaaaaatctattatttctttacaaaagtaaaatagaaattttacaagcaaaatgggagggagtccggagtctacctcacccagagatattggtacagttaggggagttcttacctatcagtgagagacaataaaacagcactgctgaaccagagccatagtgtcagattgagttcagaatctatgctacactttcagttatagacataaaaaaggaaagagacaaaagttggatgcataagcaatagaggaagttaggattctaggaaaactatctcaagcaaatggccagcagaacctctagcctgctaggaagacagcatcaaagtggtacagtattcatcagtgtagaattagagctagagtctgcagaggaacagctgcaggagttctaagaggaaggaccctctgggatagaacaagcactcacaagggcccctgtgaaggacctcccactgatggcactggctctctcaaaggtcacacttaggggtgtgattagatccaagagtccaataaaaattattaagactccagagtgggtcaacaaggaggcatgtgaccacattcagaacccaaccaatgaccaagggctgcctatatccatgtgtcttttcatgctgacttcattcctctatgtctgtctgtctgtctgtctatcttatctcaaaaaccaaaacaggcatgaggattttttctgtgatggtttgtatctctattgtgtatttttgctccttccctagtgtttcctccatagtgtacaagttcaacattctagtgagcaaagctctgagttaactaatcagatgtgtatcataaaaggaggtacttagactgaaaatgcatatgcagtatatggttttgaatatgcagtatagtcctacattttaaaattctacatatgtttatttaagagacctaaaggtaatgtcaataactctgtactacttcaaatgggtaccttagaaatgaaaaagaaaaaaagaggataaactaaatattttgttatggtaatctaaaacctatggaatataagctaaagaatccttttcttaattatagaaggagagaacctgcttgcactatgctgtgaagaagaggtttaccttttttgattatctactcattatccttttaatgcctgtcttgcttattgggtatttcctcatggtgagtactgttgctagggcaaagggtagatgtgtaagagagccatggagtgactcattgggttttccctggcagtgtgatgtaaagaaatgaccataaaaataaacctttggtttgtgcaggtgtttcttgacttacagtggggtcctatctcaatgaacctctcataaatgaaaatgttgtaggtagaaatgcatttgctttatgcagcctgtcaaatgccatgtcttagctccacagtaccttctagaataaacatacagcattgaccggttggtcacactgggagctataattcacctccatcacctagccgcacaagagtctcagaaacactggctgaggtttgtcccactgttgagaggtgacaaaaacagtgcaacacttacccaagttaagtaaattgctatgttacttcctttatgttgctagctgacaatagttattcctgttaacacaagttcagtacaaattctgccagttaaaaatgctattttctacttaggtacctaaaggatacagaatttaaggagtgtattgagaattctttaattcaattctgaacacaccatttgaacacacatctttgaagacttttttaaaaaaattgtgtgtgtctttatctcacattatttgaacatttgtaatttctgggcacaaagaatctgatattcacttaaacattttagagattttgaaaaaatgcattccaagatgatgactaaggcttgttcagaattcactgtcacacagctcttctttcaaacaaggctcagaagttggaggtctaggtaaagatactgactgtaaccagtagccctgctataactgcatacctacactgttagtgggacctggcatggttaaagtttatgatacacaaggaagaggtagcatggcatgaattacaggggagaggactagaaatgactaagtcacttcagagaagggccagggcagaaagaatttagaaggtgacacaggggaaagcgtggtgaggaagacacccaagtggcatttcagaggttgaatgggaaaactgctaggcctggcttctgtgagaggaggtctttgtctcctcaggtgagcggcttggaggaaggttcccactgtagtgtggacagaatcatacttaagaggctagagagagacagaaagcacattctgaggagctccaccttgtgccattgactcctgcccttcaccatacgtttatcttggacccccttatgtgcaggtcagatgttagggaaaagtaaggtcagtctttgcccccatcaggtacagcatggtgggaagttggttgctatcaaatgacatggacttgtgggaaattaccacaaatctggggacacagaggatacgggcctttacaaagtccagaagaaaaatatttcacctggccgagtaggccagggaaagccacagaaaatggacatggattgggaatatcacaaacaaatgtctaggcaaagaaaacttccagttgaagaaatatcctatgacatgtttctctgcagagagagcacctagtaggaaataaagacttaacaaaatccattgtaacttgagtaggggagccaggaggtaaagcatgcaaaaaggccatatgctctaaggacacgcaagatatacgggaattgatgaaacttttgagctagcaagggaaagacaggaactagatctcattctcataagatgtcgtggaaatggggttaggcctttgaatatgcattctgaacaaattcctgggtgatgaagcttatgttcttgaaacacagcttgagtactatggtttgactgatactgtagagagagagagagagagagagagagagagagagagagagagagagagtgtgtgtgtgtgtgtgtgtgtgtgtgtgtgtgtgctaagaagtaggagcataggattaccatgtagccaattgattggaacagtcccaagcaagaagtacaaaatgtttgtgtaacacgttcttataattgttgcttgtaacaggtatcaaagacgaagcagaacgagaatcttgtgcgcatgctccttgatgctggcgtcgaggttaatgctactgactgtgtatgtttgaattttgaaataatcctcaaatgatatacttgggtagaatacttgctgttgacaacgttccatgctttatttttctagatgtttacatagagttttgcttttttctcattgtcatcattgaagtaatagatattcttctgttaaactcatgagcatacaatatttgtttattgtaggaaaattttaaaataatttccttttgattatagtgatccattaaggaaaatgatgctaaaatactatcattagcagtttggcagctgaagtttaggtagaattcctatttgtacatttaatcttgccactttttagttaaatgggcttggaacactataaacatatctgggctcaattttctcatctataaaatggagattaaaaaactaattgtgatggagtctgaacggaaaacatgatacaagctacgtaaatgctctaccactgagctatacatatcctccttaaatttgtcttgcttatttgttgttatgagacaacctttccttaagttattcaggctggccttgagcttgtgaccctttggctttagccccatgaatatctggtattacacacctgcccaacatgcatagatataagttggaaattagtactgaccttatagggcaggttctggcaaaatcctcagaagagattagaatgtagtcagtgctcattgaatgttaacagctgctgcattcatgatcccaatcactagaagagatgtctcttttataaatggaagggagatgaggtcaaagttgagagaaaaaccccagtgttgatagaagccatgatacccaaagcaccatcagctccctccttcccataaggcagtggaagagtttgttttcacctttattccagatttacttcagcggctgatgctcagggtcagctgaaaatttattatcccatcgcttaattttcttatattggttagataaaatttttgattttcaatattttagcaaaaagggcaagttgaaatttggtttaaaaagaattgagctcctatttgtgttgcctaacttattctctgggtattaccattgttctgtgataagtgtccacttcattcttgtttctattaattatttacatcatttaatattatattttatttgtatttaaatgaagatgagtttaatatatttttataatgtgcattttagtttagaatagaaaatgagaaagggaagtagttcaatgtcttattggattttcatatacataatgaggaagatagcgcaagaaatacagttgctagttgtctagaagattggcgttggttatttgtccactagcaaatgtgaacagttgctctagaagggagagctgaagtctgcggacaacctggctgatgagctacaaggtcagttctctgtgtttcagtatggctacactgctttgcattatgcgtgccaaatgaaaaaccagacgctcatccccctgcttctgaaagcccgtgcagaccccatgatcaggaacaaggtaagagcctagcaactgtgctcctccctggggcaagcttttctcatctgggcctcttgtacaagtgagttcactgtctctcctatgagtcacagtaaattaattgctcctctcaatgaaggaaagatagcactagttctagttttgaaattaaaaaaaaatatcaatactttccacatttggtattaaacactgaatgtttaatatgctgggcaagtgctctacaactgggccacatctccagtgcccttttgctttgtaaattttgagacagagtctcattcagctgtataggtagggcactgaatgtcttccagtcggttactttttttttggctatgtatgtatgtatgtatgtatgtatgtatgtatgtatgtatgtatgtatgtatatatgtatgaatgtatttgaacaggaggctgtctgaagcctccacaaagtgtgagagtcaacactctgtctaacctgctgactagtcctcattgacatctgtttttcctgaaagtaaataatttgtttttcctgcagcatggtgagagttcactggatattgcacagagactaaagttttcccagattgtatcaatgctaaagaaagcctcatagttctgggacttctcatgttgcaacagagacacagctgaagaactagatgttgtccctgtcttgggtgattgctatgtgagctctcaagctggatgcatcagtattgtgacaagccctggacttcaaaaggcttttattcaggggaagtcagcatggccagaatccctccgaaggacccattaagcttgttggaacctctattactgttaaaactgatttttaaaaagttctaattcagtgtcttctaaaaacaagtcagagctacctgagttcaccttctctcttcccagttgtgtcatccttcaagacaactttgccctacatcctgtccagggagacaaatggcttctcacaggccccttgacatactaagccaagcaatcagagcgtgtgcatttgaatggcatggcacatatgtatgggaagttagagacgtcaacataaatattcctttgatttaaaatcttcagtaagggggctggagagaaggctcagaggttaagaacattgactgctcttccagaggtcctgagttcaattcccagcaaccacatggtggctcacaaccatctgtactgaaatctggtgctctcttctggcctgcaggcacatatgcagacagaatgctgtatatataataaataaatcttacaaaaagaaaatcttcaataaacacatctgccagttgtcagctatcagtttgtctaaaccatagaaattggcacatgttccatggcagaactggtttttgttgtttctcaggagctgactgacctccatatcagcatccatttcaccatcagtttataagtaagtgccttttcagtttataagttatgtaagtatcaaaactgtctgtacagagtccctatggggctgaagctgtaggtccatggtacagcatgtgtttgctatgcataaaaccttgagtttaatccccaacaccagaaataaagaattttcctgtgcacacattagctgctatttatttatctattttccttttttttgtggcattgggaattcacaccaagtgtgtcatctatcactctcagccccagttttgtttagttttgaaaaatttgaaatagtataactgatttctttaaaggtattgcttcttcatagaaaaagagaagtatttgggttatgaatgtgagaagttataaataccaaactatgagtcttacttcttatgtgaatgacactgaatggaaataaatctgccttatgagtgacttttgaaaacccggatgatccacgtacagctgtagacatggactaagccatgctacacacagttaataatgaaagccaaaacagttaataatgaaaggtttgctttccttgaatgcaaaaagtatcaatgaaaatccaatctggaaatgtttacagagctatgtacagaccctgagggtacacataggaccttcaagtctctaaggaacttatataagatccacttacattggactaagttaccaggtaaccctgggtaggacagatgaaattcacagtctaagatatgttcaacagacacccatctattctcaacaggtgcctctggcaggcacagtagagctttgatttgtcttctgagaagactgccaaataatattcaaaatttacaacttgtcatttttgaaactgtgtaaaaattaaagagttttctaaggacttaaatatagatttatgaatgagttaggagattaatttgaatgattcttctttgattaaaagataaaatatacagcaatttacttcatgctctttgtgacattacaaaagtttcttcatagctttcattttcagcagctgaaaatctcagtgctgacacacagatatgctatatgagatacataatttattgaaaaactcataaataccctacaaaatatctttgaaattcagcaatgaactttgttctaaggttgtttagcttagattctacctacaccataatttcatttttctgttgttgtccaaatagcttggcttcctgaagcagtatcctgtctttatagcaataagatggcaatgtccagttcattttatccaagtcaatagtccaaagatttacaatttaatctctgtcccagtaaagtaaaatcttccttttactttactgctccaaaatttaacttaaagaaacaaaaatgagtttggaaagggtgaatgatataatgaatgtctagatactttctgttggtcaagtcataactacacagcaagatggtaagagatcctaagcaggaaacctatgttcatcaactcagcttaacctcgtggaaaaaaagtgtaagtatcagctttagtgtcaaatgaagaaacctgaaacttccatttggaccagcagaccttctggcattccccaatcatctctgtccttctgtttaactgatacaccacgtttccaagtctagaaattactttgaaaaccatctttctgtggtcctgcccatactgtgtgatcttattccaggacttgctgacagcaggagcttcacaatgtgaccttgcaggttccctgggaaaggttgggctccagcttcatcaggtgtatgatttcattgtacactcggtgaggggcatccagaccccagatgaaatccacgtgagcccactcagggatgttcttgtggtagatgaggttgctcacttcagaaagcagggtctttacatcatctggatttgaaagccagtcttgacctccagtccacattgctgtgggcaccgtcatatcacggactttgtaccttataggagttggctagataaagagaatgtttaaacttcacataatatttttaacatctaaatttacaacttctacttcaagcaaacataatgcacatgtcctgggttgtgatcaaaagtgtttataggggttagagtcatgtagaactatgttaagaatttctattccaggttcaattttaaggaaaacgtacttactgtgattcaattttagtttcaccatgtgaaatggagataatagctttaacaccttactagatcctgtgagaaggcatacaaattaattgtgtgtgtgtgtgtgtgtgtgtgtgtgtgtgtgtgtgtgtgtgtgtgtacatagggatttaacccagggccttaaggatgctgaacacaaattctacactaagctgtcttacagtccctatgttttactttagacattgaatcatctgtatttttcttattaaacatttcatacgtaaattcccttttaaataatgtccttgttagttatagtttatggtacaagaattggagacactccacaggaaagacaagggaacctattaccaaggccagtgtatccccaatggacacagtgggggttcagcttcactgaactcaccgaaccaggagaaactccaaatcaaactcaggcattcagctactctaaactaaggaggacaaaggtaatacctgtcccaacctcacactcagcttccccctaaatcatgcaaagaagtcctctctatccaaggaacttctgttccctgctgcaatgctggtagattttccaggcagtttgagtccctgaaatcagtcaacactcagaaattttcatagaaccagagaggccagtttcttagcatgaaatcaagagcaagacagagctttaatcctagatatcttccttgtcttcctggccccataagaactgaagtggctgcctaatttagatgcagagcagaaggacactctggtgtgagcaatgctccattttgagctaaatgccccacctagcactagctgacactctatatagcatcttcccatacatttgtttttcttcccttcattgccattttctcatgcctagtctgcgttcaccaactcagcccacaaaatcctcatagatgaaaaacatcttagaacctgaatgttctttctaaagtcatgggtttgaagacagtcaagggagatatcaaaagagatagttgaaaaatgtgactaagtttggtatctaagggcaaccacgtagttcacccaacattatatgtctaggtggattactgcactggatgttaagtacaatgtgagacctcaatctgtatgacttatctctattatctacattcatgataaccagcaatcttcagtgagagttttgcactcaaaagagcatcctttacaattgtgattctccacatttctatttcgtactcctgatactataatactgtttgtgtgggtttctttttgtattttagcttgaaaattatattaattaaaagcatgatcagaaagtataagtgcatgtgtgcacgtgtgcacgtgtgtgtgtgtgtgtgtgtgtgtgtgtgtgtgtgagtgtgtgtgtgtgtgtgtgtatggtgtatctatgtgtgcatatgtgtgtagaggtgcacaaactgtgagacaccatgtacatggatgggggccaaagaggacatggggtcgcttgtctatcactgtttgttctgaccccttgagacagggctctcactgaatctgcctggtcagtaagccccagcaatcctcctgtcttctacacccaatctccagcattgaggttatagacatgcttggccatgcctggtttttaatgtaagagctgtgagggactcacatcctcatgtttgcacaccacatagtcttacttacccatggaatatctccctagtctgaaaggcagcttaaggataccatgagtaagccctgaattgtggaagcctacctacaattcacaggctagaggtacagagccatggcaaacaggaatctccatctactgcttcaggctctttttagtgtgccacatcatcagcacatctctgtgagcatgtttgtctttgtcctaaaaggatctctcatccttgactaactggacccctttttctcccaagaagccctggtgcattgctcttgggacaggctcaatgacacaggcctcctacttcttgcagaaataacgaggctgctggctaagccgtgtactttcctattttcagatgcagttagactttgaagtatcatcttccctgcttgaatctctgtattttattactccctctggggtcaaatagcactataactcccttctcacacatttctgaagggtgatgtatttttagcaggtggtacttgacagtcttacttgattgcatttctccaggtttttggtctcacttccccagtcaaaggcacgaagttcaccagaattcactgcctagaacggaaaaaaaaaggtatttaaagggagagatggggtaatcaaatgcacaccccatctttggttgtgagaaaagcagagaacaaaggtctttgggttattctctcattccactctggggggtccttttagaagagtgcagggcatcaatctggctcttttagcaagaaatagctgagctttgccgttgcatctactgcaggaagtgcatctgtggtgtgtcagtgtggctgggtgtttggtagaattccagatgccaagatagggctgctcactgcacctgtgcaatgccatactcatgggagatggtgcccatagcttctctactgacctcctctgtctctctcctccttccctccctacctccctccttcctcctcctcctcctctctctctctctctctcattctttctctctctctctctctctctctctctctcacaaacacacacacacacacacacacacacacacacacacacacagacacacacacacacacttctctcctgagactttaaggcttacaacaccaagatgtcttgtgaaaacttcattctacagtttggcccacctgaacagaacatttctgttctggcttgactgggatgctaaaacagccagtaaggactggcagaaacataatttccttcatcatcctttgggactctgactccagacagagaagggtctcatttgaattgggctatactcaagaggtagtaaagacaggcttaagtcactttctgcccttgcctcctgtcactggaaatttcaagtaagttcacattctagtatcagtggccggattctaactcaggataaacagaaactgtcaggctgtgtgactggtacagacataaggatcctcatccaggctgcaagctggtcattcttacctggctccagtggagaatattctgtacagatgttccggcaggtgtgtgggcgacatacacgtttgctcggctctgtaacaaagcataatggcttagggggccagatgtcagtcttgttgagacctaacctccatggtgtcaggctaagaaatgggagcatcattaaatcagtggccataatctactaaacagaaaagtacatgtgtgtgtaaatcgactgccattgccttcctttcgaaatggtgttgttcatttgagaatagcttctcatgaaaaagaccttacaagtttcaaccccagcactgcaaaatagattacacaataatcaatcaatcaatcaatcaatcaatcaataataactttactagagacatttaggataaggactcaggtactggacctagatctattgtttaattttggggtggatctgggcaagttaattaacccctgaattcagtatactaacccatagagtggacatattaataatgcttgtctcttgggtttgttgctagaaacagtttatcttggcacagtacaaatgcctgttaaatggtggctatgagttaattcactgttgcttctttctttaaagagaaaatttcttaggaataaaagatgttactccagtcaaagggaatgccacagaaaggcagtcctccatggtcagctctcacagaggtccttgactgaagacccatgccttggctaaaatctccctcattatcatctctgtgggattgattagtctaccttcaggaatcctagagcagtggttctcagctttcctaatgctgccaccctttaatacagttcctcgtgttgtggtgaccccaaccataaaattattttcattgctgctttataatggtaattttctactgttatgaatcataatgtaactatcagaatatctgatatgtgacctctgtggtgattatgacctacggtttggagaatcgccaccctagagagtcaacttcagcttgttttgaagttgcttcatggccctaagtccattgtccttccttgtctaggaattacctcaagagacacatcattttgtacatgaatcctcaactcatacatgctagagaacacacctggtgacaccaccagaatctacacctaagccaagctgaaattcccatttccatcacagaacttcaagtgcaaatcaaacccacatggaggcagatgtctggttgattgacctccagtttcctggttactttcctccatgcatttatttctgtaggtttcccaccttgcctgtaacctgtcaagttagggtctggcaatgctttcatgttaaccttgcattattccccccacccccaactccccacccccacccccaaccccccacccccgcccgaagcttgccaatgtgttcttacaattaggaaatcacaaattacatgctgcccgtcatttctccaacccttggctgtcgttaactcattttcaaggactgagactaagagctccaagctttgcttaggaaatgaagttcttaccatgttcatgttgttcgtgttaaatccccccagaagtaatatgatgttgctgcagatctggtcaagaatcatctggccacaaaggtaaatgaaaagctgtctgaaaaatctagtctgatataaaaattcctgtctgccaaacaacccctgtgaagataagatatgaaataatggccatgacaatatacccaggaacagaaatggtttctgtttaaagcatgcatcgtaagaaataatccccagcagactgagacatctgtgctgtcacatacctttatcatcatatctggcagcagcaaaaatttggtaccaggacttcttgcatatttaacagtggctataggggctaaggcaaaatacatttttattttatgagctagctctggcatcgtggaaaatgcaataaagcctgtaaaagagaaaaattcatcaccacgggtaccggatagctaataactcataaaatgtgtattttacttctgtcaaaatcctctaataattatgtgtgattgtgtcttactcttcctccgatgcaattataggcttcagggacgtagtgtatgtatgggatggggtgggggtgggttttaatgcaaaaactcttgtgtttcgtgtgacacctttcatatttgttttcgggtagtatgtcctcattgagttaaactgttcggtttcatgcccagagtagaaagaacaatttcccaaatactcttactattgaagatctctgctgaagctatacaagagaaaggctgtcccatgaagccaggacctggtcttatatttgaaatcatttatatatgcacactctctgtttaggctgatacttccagtttgagggatggggctgaggaaaagtcgactcatgacctctgttcagttcccagaaagtgaatgggtatgagagagggcagaatctttctatacagtcctctttatctgattaggtttgctaactataagcaaagacaaatacagaagagacttattattacctcttgctttctcagctatgctgtgagtacacatggatgggagtacataaacttatcccaagcagattaattctgtccagattagaactcttctcaaatgtcaagatctgagagccctaaatagcctctcccaggaagacttcttatcatacaaagcaagttcaaggtttttattttaacagccccatggtttatcactcgacaaatgtatgctctctctatcattcattcctcttaaaacagcctctagccttgccactagcactctgccttcatgctaaactcaacaatttgagtacagagaaaccagtttaaaaatacctctgaattgtagaggtatgaagcattgtaacttttctgtctctggtttgacgagaggagcaacactacattactgttatccaagattaagagaagggaagtgtgaaaccaaagcttctttcatcctttagggtatgggttaaaaatgagcccactgaatttgagctctcagttccaacagccattgaaatttttaattcctaatacatctttaatcttatgtgatatcgtaacagtcttggtgattgttggaaatttttataggaaacaagttggttccatgaatgagacctaagaagccccagtggaaacctgttgggagccaaatctcagggtttggcatgagatcctaggtcatgcttgtcaggccatataattaacctttacacagcagctccttagaacctcagctcaagaaaaaaaaccaacttgacccagtcctccacccacaggctcagtcatctaagcaaccccttcctggacctcttactcatgaactctttaccctgccaaacatcttctttgtggcttcctaatatcctgcctatactaacacctggtgcacaaacaacccattctgcccctccccatatcatgctttgctgactatataagctaacctgagaaaaaagtaaagtttgccgcttgatcagaatcctgtcctgtggttgttctttctgtgtctcctgtcccccattccctatccctgactctcttgccccaggttgatgtcctgcaggtcaggatagaaaccgcataattcccaatagatactgatagtaatgtgattgatacagatgaagaacaaaagataaacaaacttagccagctatactgtgcttactgtgcttcagaatcaggctaattttgtgtgtaaatcatgctatttgtctagcaaaagttgatgtctaagacttggccacaactactctgtatgatgagtatcctgggctggataaattttaggggaaatgctgacatttggtacacataaattctccaataacatgttgaacctgcatataacaattttctccttctcatcctggctcattctcctttgaatttctcaaagtaagtacagtaagtcacttattcctttagtagagtgttaacagagccctgaggaatttcagagaaaggtaagtggtcactacattcattggggaaaatgggagctagtcaaaaggtaagtttggtgacaccatttaatgataagtgagaactttggcagaatggaactacaatggcgagtcagtaaccatgaccagattgattgcgtggtctgctggcaccatagtgtattgctgagttaaggcaataacgagaatcccatgagttaactcagtgctaattgaggtctgtctgcctgaattcataatacttcagtagaacaacaggtttcaaaggtatccttgtctggtccttgaaagactggacttaatagtcctcaatggttgtagagatggaagtaagactcttctaggagctgaggaatgtgtgtgtgtgtgtgtgtgtgtgtgtgtgtgtgtgtgtgtgtgtgtgtgtgtgtatttcccattcaatgtgttgccctcactgtgtatttgtcatttgacatgcacaagtgcagttactggtttagtggctcacacttaagtccctagttctttctttatgttacaattcattcatctataaaacggggattattatgaaggctaaaacaatacaaagatactaccgaatacttaacttcatcttcttaatgagtagaaacactgtcttggtaactagacatagctaccctgaataaaaagaatatatatttccttagaaaactgtaattctttcagacaaagataaagagcctggattaattccagattttaaaccctccctttgtttcatagctcttcctcctaatccaagcctagtgggtgttttctcattggtttgggtatgatatgagaccagaatagccactgttcccatgtccctttgtaagtgatcttgtcctgaggggtggtatgtcagtctctcacagattcactcaaagtaggacataagcacctaatgcgagactggtaatgacagcaagagagaaacttgagttaacaccatcagttctgtttatcactcgatgataactctgtgtctttgttactgctctctacgaggccaactctgaacccaagacttcgttcactgaacacattcatcgagtgcatactctgggctacaaacttcaattacaactgtgtttttgacaaaatacctgctgccttctcagagctaacatacatcattgtattaagtaatagtccaattacttagaatgccttaagacagaattattgtctccattttgcagatgaggaaattgaaaccagtgtgattaaaggatttgttttgggatatcgtctaaagagtggcagagatggtatttgcacctaccccatctgccacaccctaggcctctttcagttcagcctccattccctgaagcttttagagccaccaaagaggagaaagccaggtgaggggagtaattgactgagcccaattacaggctcacacttctacagatacaaaccttctttcctgtgaacctacccatggtggtgccctgtgaatagccgacataatagatctttttctggcctgttttctgtaagataaagtttatcacagcgggaaggtcaaacctagccatttcatcataactacaaggggaaaagacaaagttagatatcaattataatacaaacagaacacagtcaaaaatcactcacctccctcccccagcatctgccaacaagtcccccctattgtcagctcttactgtgtttctcataacacagacttgcttcaagctgtggtgactctgtgacatcacagactgatagaaatgtctattctctttggatgttataacagagtgaagattattgaatagttttggacacacaagccaactcctaatgtgagtagtgttataccctgtaaatagaacagcacagtgggatgcagatttctttgtaggacaaatactggaagtgtagcagaactcttgtctgatgaaatggataaagaatagattgaatattggtggtaagtaaggaccttaggaactccagtgaagttacgagagactacttaagttggtggcacacagagatgaataaatccccatttaatgacacttgatctcatctcctgggggtgtcagccatgttgtcacatatgagggagttaatcctagatattcactcatatgaaaatggacctacacttttctcactgcagcctcaatcactggacaccaaccactgttctcacccccttgttagccagaccttgggaaagccagtcttctcctttcttaccctaagcatctcaagataattaggaaaaatgggggatatcaagttgggaatttgatgatacaactaaatgagctatccaagtgctgcaagccacaaatcttcacccacttcttgggtgcatctccgtccacctccatcctcaaaggtttcttgtacctgaaagcccagaactcatcttggtctatggagagagtcttgtgtttccgagaccaggtatttcctctgctgtttcccatccacacatcaaagccagcgtcagccagaatgaagcccaggctgttgttgggcaggttggaaatccagttgctagcatccccaagaaggccatgctgcagtagtaccactggcctggaccctgcagacaaagcaaattccaactgccatgaaaagatctctgttcttgctttctctacaaacaaggacttgcatgccagggaaatttgtgtgcaaatctttcttttactgcttgctagttggattttcttagttgactttttaatgcttttcttgtgttttaggttcttcaccaccagaaaataggaattttttgtgttatgaatatataaaatacatcacaaggaacagacagcacactgcctgtcaatggggggtaaaaaaacaaaacaaaaacaaatctaaaatgcagtttccaaggttgtttttcgaggaactataagtatgaaactgttagtattaggtcctccaaaaatatttgggctgcttcagaagaggatattttataatgacgaacacacacacacacacacacacacacacatcgccctaatgatgaaggctagtacatgtaaaaaggacctaagctcccatgcttcagagaaatgtgtctatcagaataaaattgtaagatgggtgtggtggcctatacttgtaaaaccagaactgaggagactaattcaggaggatcatgatttttaggctagccagggctacacaacaagactcaatcaaaacccaaatgaatgaataaaaaacccaattacaatccattaggaagtaacaggaactgtaagaatatcggccactagccaggtgttggtggtgcacgactttaatcccagcactcatgagacagaggcaggggatctctgtgagttcgagaccagcctggcctacaagagctagtaccaggaaagcctccaaagccacagagaaaccctgtcttgaaaatacaaacaataacaacaaaaaacaaaaacaaaacaaaaattggccactagggggctgtattgcacaccaattgaacaaagaggctttttgaaggtcaacactcatgccactcagcagtatgtgagtacaaacttgaccctcggagcagggcgggagtcctcttctcactgagctgagcagtcaataccgtcacttgactggaagcaccaagccttgcccaagcctgtaggacttgtgggacttagtgaaaagtctgtttctagggtattcatctatttgcacatctcattccttcatctcacaaataaatttatcagtacctagactatgctcagcataccaaggtatgttagctgatgcacagaccttgaatgaaatagaggtccctgctttattgagtttccactctggcggaggagaaaaagaaactctgaagaaagcagctactgtatggaatgtcttcaggcatataagggaaagaattagggagtgaggccatgtgtcagaagaaggcatgaggctgcattctgaacagagtggtcagggaagaagaagaagggtcttggaaagctgcaaaaaagaattataagttcacaggcattggggtggaaaccaagcagactgcaatcaggttaaacatgtgtgaaacagggactcattttttaaaaaagactttgcaagcacagattgggataaacagaaatctgtactttttacatcaaagaccaataacgtttggccagtgttagttaagaacatgggctgcaccctgacaaacatcttgatttgagtgccgcaagtattacgatggaatttctggtctagtttgtggcagagtcataatgaaaattacatgagactaagaaaacgaagcacttgatattatagcaggtatacagagaggacccaagaagttatattttgtcacccatgacaaaaatgtagttgctgttatcaatgcagagccaaaatatgaaaggcacaaacatcagtagtttaaagagtgtcagctgagaatctcatataaaaaatgaaattaagcaaaagacatgaacacacactgaaaattaacatatgtgcaccagagcctggttcctagtcctcagtggaaaaggaagcaacatcccaagtgtttgaagtactctttggttggggaacacattgtacaacttggagcttcaggtacttcctgggagcttttctcttcatttggtcttttccaggaatcatcagagtatatactagaatttctatgtaggaaatggattaagtgccagcatggaaaaaatccattaaaatggatttcttgaagatctgttctgtttgtggggttttgttttatttttattttattttataatgatggtaactgaacccagggactcacaaatgcttgtcctgttttctacccatgatctccctctctagatccaaggtaattttgaaaagaaaacatccgtctaagatagttgatgggtatgggtgggtatggaatgttatatggtaatagggacagacattatgtgggaactggcattacctttcagcctaatcaagagacttcagactgtcctaagaaccaaacttaattctacatgtcaagaaagtctgacctacaagaagactatcatactgggctgacaccaagtaaatccataccttccttttttaattgagtcagtccttgagggattctgttcacagaaaggatgtatccatcttcagttgcaacttcatattcctcactgggataacccttgtgtttgatgatttcgctctatggaaaacaagcaagcaaacaaacaaaaacctcacgatttatttagaattcaggtctacatggtcattgccaccacggtctcaagagcaagattaacttctttggtgttgcaagaaggtccatattgtttcagtactggagaccacacccagggcctcacacattaggcaagtgctctgccactgaactataccccatctctctcacttcttttttgttcttcatatggagactgaaacgagaccatggttttcagtagttgggtcaattctgtcagcctcccctgggtattgctaggaaggcagagaatggctataaaacctactgtcttaggaaccctgaagatacatcccagcaacctgagttttgaaaagttcttcacagaactctgacatttgaaaaacactgaagcagaacacagattccaaagcccacacatgtgtcagaatcatccagggccactgaaggtatagaatcttgggctcaggccacattagaaatcagaccattgtactgcaattgttagcacacctgttttggaggtgacttaaggacattcctgggtcccttagtcccttagactcttttagttttaaacttacagactaaagaacagtaagtcttagcttttagacagaaaaaagccctctttggttttggggataaatattaacatgctatgcataaactttttgtatgtaatttcaagagtctcaaactccttcgtgtttgcactggaccactggctaagcatctctactccagatagtagtgcatgctgaaactcttcctcctaagcctgcatgcagctcttgccatctgtcaccatctcatcagtcagagaaggaggggaccttttcaatcaggggctgttgtaaaatgagtaagagaggagaagccatgtaccaaagtgttagtgctgaatatagagtaacaagcatagtcattaagaagaaaggccaagccaggggtgggggtggggatgggggagtggggttattggagcacacctttaatcccagtactggggaggcagagtaaggcagaactctggtttaaagccagcatgttctacagagtaagttccaggagagctgatacacagagaaactctgtcttgaaagaaaacaaacaaaaaaacaaaaggctgaggtctcctgctgggctataaactaatacacaagtgacctgtgtgatatcgaaaaccttaactacttactattccttactttattcctctgctagttcatgctatataggataaggcaaggaatatgcacaaaacactaatgaaatgcctgacaccaacaatatgtactcagtaggaattatacataattaaaacccaataagtacacaatcaaaatccaactaaccaaacattgtggaattgtgtgtgtgtgagagtgtgcgagagagtgctcgtgtgtgtgtgtgtgtgtgtgtgtgtgtgtgtgtgtgtgtgtgtgtgtgtgtattctaccattgcatggttaaattgttttgatcatgcatcaaacctacttagagggcttgtcaagacacagattgctggattccatactcagagttttggcaggtctggagtggatccaaattattattatttttttattcttctctcatatattacatcccaatccctgtttcctctccctccactcctcccaggccctccccacaactttcttttctttctcccctggatccactcctcctccatttccctttggaataatagcaagcctcctagggttatcaactggatatggcataacaagacacagtaagacttggcactgatatttctaataaactttctgatgttgaagaagctgcttcttctggaaactgttcttcaagagtctctgttggggacaacttggagagataaaagatacatccatgaaatgttagaaggcttctgagaaggtctatgtaatttgttatgggggtgtgggttaggtgtaaataatggctgaaggaagtgagggaaggaattctaagcagagagagatccatgaacaggaccagtcagcaaagttttctggaggagggagaatttgctctggtctaagactgaataggaactacccaagagaacctaggaattagatgttagggatgtgggtatcttagatagaaaaagattatatgttagtgaacactgtcactaggtggtcaggagactatatttggcaagaaaattcacatgggataatactaaaacagaaatgtgtctacatataaatgtagattcaacatatttaaagattttttttataatcatgtttttctttgtgttttgaggcaaggtctctttctctatgtagccctggatgtccctgctatgtagtttagtctgacctcgaaattacagagatccatctgcttctgcattctgagtgctgggattaaaggtgtgtaccaccatgcctggctgcttagccatttttgaagggacatatatcagtatatatatatatatatatatatatatatatatatatgtgtgtgtgtgtgtgtgtgtgtgtgtgtgtgtgtgtgtgtgtgtgtgtgtttgtgtgtgtgtgtgtgtgtgtgttaacacacattcatatatgcattctgagtcagagcctcattgtagagtccaagctgggctaaagcttggaaaacttcttccttcctaagtgtaaattaaaaattataaccatatttaatgtttaacgttcaacctaattatctgttttaaaatttttacctgaatgaaaaaaatcagttatatgaattaaaatattactttaagagtgtttaccctttgttcattgtttttcttagaaacattgtttttatgtgtgttgttgttgtattgtggggtcaagagttccctctgcttcccttagaagcttgtgaatgcaggtatgtgccactataccaggctacaagaattcttaataaacatcttgcatataaatcatgctttaaaacatttctggggcaaatatgcaaaccacaaagtagaatatgacacagaaaattgaataatgttttttgagtttacttaaaaccttgggaaattgaagtggatattagatgtaaagcaaaggataaccagactaaaagtctgtagctccagagaagctaggtaacaagtaggatcctaagagggacacatggatcaccctcagaagagaaattagataatatctgcagggcaaactgagggcagggggggtggtaagggggaggtgaggggggatgagagcaggagggaataagatggcctaggtggagagggaatatggtggaagagcaatgaaaaacagagagccactatgggcttagggagaaacttggtgctaaggtaactcccaaggagtcacaaggaggaccccaactcagactcctagcaatagtagagaggatgcctgtaatcagattgatgaataccccgattattgtcatgtcatagagccctcatccagtaattgatggaaccagacacagagatccacaaccaagaaccaggccaagctctgggaatccaggcaaagagaaggacgagggaacatatgagcaagggaggtcaagatcataattgagaaatccatagagacagctgaaccaagctcatggaaactcatggactttagacctacaactgtggagactccaggggaccgaactaggccctcctgtggaagacagctgtgaaacctggactatcagaggggcctcaggcaataggaccacaatacaaacctgacacatgaactagcttgctgggcccattccctatggtgggatgccatgctcagtcttaatgtatgggagagaggctgggctctgccccaacatattgtaccagactatgttgactcctcatgggagcccttacctgtgagcgggctcgggggaggtgagtgagggtgggaggagatgagggggatgtgggaagaggggtggagggggaactgttgttggaatataaaatgaaattaaaaaaaaatggcaaaaaaaacttgggaagttgtcaatagaaaatgttggaaaatggcaaatcatgtatgatattcctcagtcttctcagaaaacttcatagatttagaagaaaatcacaggacaccacaaagctgttggtggttaactcagtgtattaatgaattactcagtattgactttgaagttcttaggtgtcatgcaagggatacacactgtgcttgtaataaaagttacttaatttaaaagtcaaatgcactataagctattctcatcttgaatatggcttgaatatggcatgctttctgcagatctagttcctcaacatgctgacctctttgctggcaacccccttcttacctcctatttattcttctggcttcaggctacaaattattttcctaaagtctggattagtttcccctgttttatgcttttctctctttgatctcagtcttgtgagcagtaattgagagtttgtcttttgtgctggattttgtcagcttagtgaaaccctggcgtttgattttccttgatttctctgtggtctaggtgtaaacacagcttcaggcatttgcagcggggcagtccagttctttccagaaatcctgacagtctggaggcactgggcttgtgcagtggttggaaaggtactccccatatgctgaagaactttgtgggggtacatttaggattctgaaagatctgcaataatgtcctgggaggacagccatcaggtaaccaataggatggtttaaagaagcctgatatctgtactctgtagacacagaatatttctacagtctgtaaattttagaaacaatgacagcagcctttgggatggcagatgaagcttggtagtcttatggagattcattttaaaaagcctccttcagtataggctgttaattttagaaaccatgcaaaaaacactagaagaaaagaaagtttctataaaaagggtcttccttcaaaaaaaaaaaaaaaaccttaagtttcctcttttaatggggatatcaggtgaggctagagagcatccaacacaatcatctcactcatctggaagttgaagctacaccctgtcaggtggtaggatttattgcatagtgcttataattacaggtatgtgtttaggaaagcctgaatttgaattgctggtctatcatggagcagtcgtagggctcgtttaacttgtttaaatgcttctttaaacttagtgccttgattcaaaaaggatagatgatcatatctccaggacagaacactgaaaatgaaattgtatctctaccacttttattacaatactgtctatggaataaatggtactttatggtgatctcgtactaaaaaacagcttcgggtttgcaagtaaacacaaaaattctccagaagacttccaaagagatgtgctgttctctgcgcttcttactcacacatcctccctggcataaacagggacctctctctgctaggtggcagagttagcactcagagaaacatgaaagtagaagctactagaagtatatgctctcacagcaagaggtcaggggtgacactattatcaaaaggcacaaagcaggaaagaaaacaaagacaaaatgaaaatcatcaagggtctcagacaggtcacacatgtttcaattttttctttgtccagtgggtgaatctgagaagttattaaagcccaaagagagtaagtcattcacccaaaatcactgaatttgattgggaagcccccaggtctactaacaaccagtttagctttcttccagttctgtgtgttgttttacagcatactcttctagcattaaacacctcaatctataaaaatgacccagcatgcagctactccacagatgcaaatacaaacacgtaacccttctttccccccaaacgtgaaaaaccccaacttacaacattcatgaacgcttccgggtccgcagcttttgttggcatatgtcccgagttcacatttctttggagtaaataagccagcaggatcaggagccatatctccactcggtgtgaaacactccatgctcttgacaagatttctgacatggtccaacatctgcatttgctttgtgccgaaggatgcaacaactacatccagagtcaggggaaggacctgtaggtttaaaacagcttttgtgtattttctagcggcaaaactctgaggcagataaagcaggtttaggtataggaataaaacaacatggtgtaggctgcaaacatagcttagaatgtcacaatcccatctggctcctcctgttcctctctcattcatcttgcaaacaccaacccttccacttctaggtgtgtccaactttccttgttgcaactgggagtttcatgcatgttttatatagcccataaagacttgttggccagcaccatgtaagggccatatgaagcagctcccctcacccccatgtttagttcttatctttgttcgataaatagcaagacctgggacctgcagaacacactgcaagtttctatgtgatggcttcaatcatcactgtcctatagctgaagatcaaatgcagagctgatcacttttatttgaaatgtcaaaagctttaagaacatttcttacttttagtgctggataaaaatgttaattgtaagaaagcaatctaggtgtagcccgtttctctctagtttaatcttatataccgcattgtaaatttggcttgtagttaccagttatggttgacagtgatgtccagtaattaaatcacctgaagtaacccaaataatgagtggcagcctagttatttttatgagctaaatgtcccagttaatcagtctgtgaggtaacctgagagcagcttcttgacctgctattcattgagcatgccaagaaggaagattcattagtttaagtaaagactctacttcaagttaataagaagaaaaaaaactgaggtaatttctctacttttccatcaattcttcagctttgacagcagccacacctgtttgcagactttgggagtgtggtgggtgaagaagtcagagttaaagctggaaagactactccgtgggaatgtatctgcccagatgactcagccttcaccatccctaccggctgagcaggtgtgaggaagcaagactgtctttatctggatctggctgagcattcatccagtgttggtgattgctacaagccagagaggagtgatttgacctgattagaaaaagctggaatgaagggctatctccaccaagccccacatactctccttggaacccactgagcttgctctaaagtcaggcaaaacgcgatctcacaagagagaacgtcacctcccacggctgacattttaggattttaaaatgctgtattgcccaaatgggggtaggaggtggctttcatttacatttcagaattacatgatcatattatcaagttagattgtggcaaagccaggagtaaaacttagatattgggcctggggaaatgcttcagtgattatgagcacatattgcacttgtaaaggatctaaactcagttctcagtgcagaggtccagtggttcagaatcgcctgtgactccagctccaggggatttgatgtcttttggcctcagggggcacttgcacacctcacccaatgctcatatattctcacacacacgcgcgcacacacacacacacacacactcatatattcacacacacacacacacacacacacacacacacgcatactcattattaagcataaaaaatgttttttttaaaaaaacagatattttaatccaatgtttaatattgcagtcacatggaaagtcccctcaacatgtccttccatgaagagatggagtcagataactacaccatgctttgtgaatttcttttcagtgctgggaagaaattgaacccaggaccttgtgactgctaggcagtgtaagttgcttcttcaggttctggatttaaaatgaacttattatatgtttaacgtatacaagctatgcatatttgcttcaatatgctcaagtaagccaattcttacctttgaataatatgtttctgaattctgtagagaccaatgatggcaaatgactggttgaaaataaaacaataggaggcagaagcaggtggatctctgggagttcaagaccagcctggtctacaagagctagttctaggacaggctccaatgccacacagagaaacctgtcttgaaaaaaaaaagaaagaaagaaaaacaaaacaaagaccctcagcctcctggttttcttagtgagtctacatagtttcctctaagcaccctgtttattaagttcaggctagaggactctctcattagtgttcaattgacttttattaaagtgattctttcagttattacaagtaatcttgaaactagtcaggtgtttgacatggaagcaatttgactgacacacggtcagtgttcttgtatcatctgcatcagaatgacttaaggatcaaatgaccaaaatgattgtgttgagtcaaactaacagcccactccttctaacacaggtcacttctcaggagactctgaggcagtcaggcaaatgggcatggcgtatctgtctcttgtttcgtcagacatgcctgcacaggcatggttcccactgagactccattgtcttctcagctgtatcaaccagcatggcaaggttcttcatagacattattccagtaatgaagtattagaaactattccgcattcctaaagcaggcagcttcgtctctgcctcccagcgttgatcttggagtcactttagcacctactgtcttagtttagttcttccttctcataggccagcttttaaaagcaccattatttaaacactgtttaaatacagtcgttaagacaggttgtgaagtcatatgacaaatgtcattgcttactacatagatggctttgggacatgttcccacggtccctgagcctcggtgtcctcatttgcaagctgtgacagtaccttctcctaagactgccaggagggttgcatcagagagcaatgccgaatctgatacagaatgaacactcagcagttttgcttcatgcagggtctaaggcttctgctgcctggtgccccactctgtcccagcgattctaggatgaagcagcatttctccatcagctcgaggtactagggtatctctgatggagagaacagaaatcacatttcccccatatgttggttaaattgtgttttctggctctttcctttcctagcccagtgatctgggtcagtcattcaacctttcacagtcagagggcatctgacatttaaagatgctgtgaggaccagtgtagtcatctaaggcaggagccaaacatctagagggattttagagggatttacagagttgtcttgctctttttttttttttagcttttctgttttttattttgttgttgttttgtttttttgttttgttttgttttgagacagggtctcctgtggtctgtgggttggcctgaaactcttaattttatgtcctcaacctcctcagcactggggttacagggatgtccccacacttgccctccccgctttttttccttaaaggaatttgtggtatgaacataaagatggtgagttccctttgcaaatttacttgtaaaccagactgaagtcatagtattttagaactaaaatcacaaattccagaagccatttgcttcagcatgctacttttactgctctgcttaaaacatatgtcatatgaaattatataatttagtaaaagtgatagaatacatatttctgtaaaactttgaccaccatgatgtgcacaaattgatatgcacattctatttccccctcaaattaattttcattaaccatttggtatatattttcaaggcattttatatgttgtttgtatgtgatagaatattctcacaggacagatttacagttgcagaacactgggcaaaaagtatgtattatcgatagtctatagcctgtaagttcctgttaaattgctccctaaaaggctggtaggaacatgactgtgaccatacccttccttcagcagtttaacatttcaaaaatccctttaattttgtcagtttcatgcggtgatacctcatggtgatttagctttcatttcatgagctacaatcagactatcatgttttaaaatatctcaaatattaagtcttctgtggatttcctttttgagtcatagcctgtttcatcttaacatttcaaagaatgatcaccttgatccttttctttattgtaaatattgatcttaactttgttataagttagttaatacatttgctttctttttttaaattttggcttgtgatacatagttatttcataagtattttgttatagatgtttcatagttaattgatttgaacttttcccttctaggacctgtttcatacacattggtctttttcatcccaaggttaaattatattctttatacatttttggtattttcagagattttttttcatctgactctagaccaattggaattgccttttcaatatagaatgggattgaatcgaattctatttttctaacctgtcattaattttgcagagatcacattataagtcttttctgatttgtctgagacagaagtcacctgcatgtcctcatcttatgtgatagagctctgcagttctggtgagatctcctggagcagtgtttctcacctggagctgtttgctctgtagaaatttggctgtcattgctaggggtgtgctgctggcatctagtggtagaggctagagatgccaaagaacaccttaaaatatacagggcagccccacagcaaagtgtgtgaccctccaaaggtaaattgtgtcaaacaagttgagaaatcacagagacatggcattctttgtatacagatctttgtacttaaagttttgtcagtcagtaatggtatttattgataaatcttcctgaaattgtcattgttttcaagtttaaaaaatactgaattttttctgtgcctggtgggtacttgtggacatcaggaatgttcaatgttcacagattcttataagcaagcctaggtttcagatcacatatatcatgagctggaaggtgttgtctgtcactcaatgccacctacccacaagaacatgctttacaaataacctcaacacacacacacacacacacacacacacacacacctacctaactgcaaaaacccaaacaaacaaacaaacaaacaaaaaaccaaaaacctttgtaacttgaagatcattagagcaatgtttggtctgttatcttgtaatattcaaatcgcttgaagattgcaattgtttaatatctatgagggactggagaagtggcttggtggttaggagggcttgctgttcttgtagaggacccaagtatggttcccagtagccatgatgggcagctcacaaatgcctctaaccccagctcctagggaccttatgtttctggttcctctttagtttcacatgcaaattaaattcacatgcacaaaactactccaccaatcaaagacaaaatcaatattgaaaaaataaatccaactatggctgaaactaaaaatgtacagatagtatcgtatcagatagtcaaacaaagtggatcatcaatgtctatgccaggtggtttactgtcatttgtaattcgacctctaattctggagacccctccaatggtcttatctctatcactgtatttcctaatgtgtggctgttacatattttaatattatatggtatgtttctttatgtgagctgctttctaatcacttatcctatgcatgctggaagatgtgaaatatttttatttgaaaatattgcttctaaaatgattaaaatggggaatacagtttctataaccatcctctgatattatatctacagccctccaccctgacaactgagctatcgaagcacccaagatattatatctaagtgctttaataagctagaaattattgttttctttgtgccattttgctcttttggacagtttgaggtggcacatcaaatgtttggggattattttagtcctggagttctgggaagagagccagcctcaggtggcttccaaaattagtatgtagaagaattctgagagcagcaaggggcactacaaatccttaggaagagggacaagtgttgggtggttgctaaagtgtcaggtgctactcagctctgcctttaccatgccctgattttgcaagagattacgttataggactgagtgatgctggggctggcgaagacctggcagagcagctagtttattttataggtgaggagccttgggcaaagtaaaggaaaatcattttcccggatatttatgatgagctcgagatgcagagagactaatgtgagcaaaggggaggagggaaggaggagaaggatagacaggaagcaagcagaggctctttcatcttcctagggcaaagggactcccaaaggatgtccattttctcacaccaagagttttaagcagtgggtgtatcttcagagactgcccttctttgcaccctgccctttgtactgatgccccggcacacccacttctagaacatatcaacaggtggcctacctcaccctgtcactggcactgacagacacctttcccaaaagctccttccaaagggccctgttttactgtctgggatatgcgtggtatattttcacataaaaaatgcagcaaattcttaatcatattacacaccccaaagtaaagcaaatcacactaaagttcacaaactctaataacaataaaaaacacctcaatgatcttaaaaatctggatggaaactagtttctccttcacctctcattgatcttttaaacctgtgattgtatctgacaagtgatggctcattgggagccaggaaaggacagaaaatagctctttctccatctcccctttttcctttctgtgtgtgtacatatgtacatgtggtatcattcctctggagtcagtcactattattattattattattattattattaaatgtaggatctctgtttagtctgaaacttagtgattcaggtggccagcaagccccacagatcctcttgtcctaataatcctcattattacaatcactggcatagtatgtgggtaccaggactcaatctcaagtctctgtagttacataggaagtactttaccaacggagttatcactctaatgtcatcattgggtttctagaaaagaattggttggctaaaatgaggataagcacaggggggtgtatatgtttggtaggatagggcaatattgactgaggcctacaagccactagattctccatcagagaaacctacctggaagagacatcagaggacagcaaaattgagtagaccggggttcaaatgccttcccctagctatggttccttggacaatttgttgattttcagagtgctttattcataaattaacaatgcaatgactttatagaatggttataaaaccaaagtaaaatatgtgtgtatgatgcatagcatagttcctggctcacagaagcgggtttatatgttgtttccactcattgttgttgttatcattaccattaggggaggtatcagctgtgggcttgaggggaataagattaaagagcaagtgtattactcaaattactctttcctttatatttcaggttcaactatgataaggagacttggtcaggtgaccgcaacagcctatcatggtctgaagtagttttattttctaagacagatgtagctaaagctgcctggcctgctgagcatttagtttctccatttagcaatctgtgtggatggccagagctggcttctcaggtcacttgtctgtagtggtgaaatcatccagtttggtgttggctgtgttccaacacagttttctgaaaaggcaaagatattttgctgtactgaggatagtctacccattgcctcttgcttacattgaaacattctgaaggtagaattctttcaattaatgtaaatgtccctaggagaaagatgaatcactcttttgattccttagagagttttgacagtcaacagccctgctgcctttcctcttttccctctgacacacagtcagatcaagacaaagacaggcagacatccctacttatcccacacagtataaaataaacatagctttctctctttctttaaagccggttacaattatttactgcttcattctctcagctatacaattaattcacttaaaaatactgaccataacgtacatttttataactatgatgggaagttcagaaatatgttgtccaaattccaatatttgtagttgagacatatattgtagaagccaccattgttagcagaaagctttaaaagaaaagcagtgagaagccaaaaaagaaatcacaaatagccagccacatgaagtaaaatggctacacagagatggcacagaagcagaaggatgtacagacataacccaccttgacacggagtcccggtgctcctgaaggcctggctcgggagtggagtcttctacagcacagagggaggtgaggtaaagaggaaacagggcactgggtgtgcagagcttccctttaatcatccttcaccttagcaaacagcttcaccgcctcaagccaaaattcctctacgtgtgctttaatctaccggtaccattatttctggctgcccagagagttccctcagcagcgcttaatttcatgtgtagggtgtttaccattggggccccggacgatttttgctgatatctgaatagatgactcagctttccattactgtgacaaaatgcccgagatgatcaacttgcataaaggagaaagctcacagttttggaaggttcagtcattggttaacctcactgcttctggaactgttgtgaggtttaacattatggtaggaagttgtggcggggattctcttgcatcatgcacctgggacacaggaaaggggaaggtcctgggtatccagggtctccttcagaggcatagctcctgacttaactcctcctacccgacctcacatcttgaaggttctttcccaatgccatctcaggctggtaaccaagcctttaacacagaggccttcaagacctaaactgcaatgctgggcacagtattttacagcacagaatcacatggtgtgacaattcatctctgcatttttagtttctggttgctgctgtaacaaattaccacaaatgtgacttaaactcacatacatttattctagtacatggtggaggttgtgattctaagatcaaggtatcagagggacgtggagacttgggggagagaatctgctttctttccctttcctgttgtcttcccaggagacagttttctttctctagctcctagcccacaaccccaacctctggctccattgtaacttttaatttctgactttgaccttcttgtctacatctctcaggactcctgtgtttatattgggccaatgtaatctcaaacccaacctaactcagtccaaacctcccaaaataggtgacctcaccacctcaggaccccaaactgttacattttacatgtaaacacaatgtgcaccctcatatgtaatgtgcaaaggaacttgtaatcgaatacttgcaagtagaaagatatggagattcatatgaaataatgtagaaaatactctagaagtggtggagagagaaattccatttttaaaaaagatttatcatgtatacagtgttctgtctgcatgtatgcctgaatgccagaagagggcactagatctcattacagatgactctgtgagccatgtggttgctggaaattgaactcaggacctttggagcagctagtgctcttaaccactaagccatctctccagcccctgcgaaatcccatttataaaactcttgtgtacatttaccagggtagttagtgaagatatttatttgttggattgttttctatacagtcttataggtttgaatcattttttttgtaataaaatatgccattgcatggaagaaacaaaatgaaccagataaaacagataggagagctgattacactgctacagactctgcaagctaacatgcagatgtctggatatcctgagaaatgccagcaacattaagaagtgattcaacaccaaatcatagacagcctgatagcagaggaaatggcaggtattcagaaaatgaagtagagaactgattttcctccattacattagatccaaggctgaaacaaaaagcagatacacagatattcaaatgcatgacatagacaacttaagtcaaagaaaacctacttctgtgagttggaaaaagatcataataaaacggaaatccaaggaggggatctgaacagcatatgcataataattttaatgatgaaacttaaaatacacaatcatggaaaacaggcacacttgaaaaattgaaacagattagctaaaaatgtgtaattacagctgtaacttcagacttcttcgctgtaatgacaaagttcaggaggcaaacaagagtctgacaacttctgaagagaaatgtttttgttgcttggtgtcagggcaacaaaagacattgccacgcatatacacttaacaaaattcagtgcggtttccttctccaaaagaaacatttaagccatatgtaaaagactgagaggaatgggaaaaataacaggcaataaaagggaaaagctagacaaatacagaaatgtagataaaccacaaggccgtgatcaggttctgtgtacccccacatcaaagttcatgggctacatggtaacttttcttctgctccacccaggtctttatcattaccttccaccctgacttcaccccgcactgctgacatgctctgacggggcatggctggatggtcacctttagtagctttcaggggactcttaggtaagagttgaattcaggacatgaaagatatattttaatttttatagtttttttcctattcttaaaatttaaattagaaacaagcttgttttacatataaatcccagttccctctccctcccatcctcccctgttccccactaacaccctatcccatcccctttctgctccccagggagggtgagaccttccatggggaatctttaaagtctgtcatatcatttggagcagggcctaggccctccccactgtgctaggctgagagagcatccctctatgcggaatggtctcccaaagtccatacgtgtacgagggataatactgatccactgccagaggccccatagattgtggaggcctcctcactgacacccacattcaggacttctggatcagtcctatgctgttttcccagctgtcagtctggggtccaagagctccccctcgttcaggtcagctgtttctgtgggttttaccatcctggtcttgacccctttgctcatcactccttcctctctgcaattggattccagttcagttcagtgtttagctgtgggtgtctacctctgctttcatcagctactggatgaaggctctaggattgaatctcattatctgggaagggcatttaaggtagcctctccactattgcttagattgttagttggtgccatccttgtagaactctggacatttccctagtgccagatttctctttaaacctaataatggctccctctattatggtaccctttccttgctctcctctattcttcccctcactcaaccttcctgctccctcatgcccccctctcccttcttcttctccccttctctttctcctagctccctctccccttccctccagtggcacaatcggttagcgtgtggtacttataagaaagatatattttaaaagggcttatgttgatgatgcttataaaaagtaggtgttagcactctcaccttagctgattgatttggttatcagaataattcacatacaaattcagaaagtggctagacaaggaaggtttgacttcagaattctctaagtcagtggttctcaaccttcctaatactgtcagattttaattcagttcctaatgttgtgaccccccaaccttgaaatcatttttattgctacttcataactgtaattttgccactgttatgaattttaacgtaaatatctgtgctttctgatggtcttaggtgttctctgtgaaaggatcattcaattccctttggggtcatgacccacatgttgagaattcctggagcaggtaactacacttgctgccaaggcagatgaagctctaacattgaagactattttagttataaataaataatccatatgcacaatttagttacaaaaatgcatgggttacatttttaatttcatatgtgcttaaatgtaatatttgagtcaccttctgttggaacaattgtgccatgtctataaaaacataaaatacattagacatcatgttattatcacagaacactgaattctatttcaataatgcttcagtttttgttgtgtatattttatcaaatcacatttcaatatctactaaaataatataatactcatcatgtccattatataaaaggcattgttcccatttcacaatgtgatttttatggcgatcactgtcacccttcactgctcataaaaatgtgactgggaagcaggttttgagagaagagagcctgcagccagcaccagcatgtagccttgccagcaagtcacagaactggttctgacttcttcagggatgccttcttttggacactacaacaggaagagatgggcctgtctcagttctatgtgtttgttcatgatctgctattggtctattttgcatcactttctgtgcagcaaccagagtgatctttgcagcagcctaataaacaaagcctcttttgataacaccctccaggattctatacttgttaagacaaagggagagagccaggcagtggtggtgcaggtctttagtcccagcacttggaaggcagagacaggggatttctgaatttgaggccagcctggtctacggagttagttccagaacagtcagtgaaagaagaaaaaccctttacatacacacagcattaaacttaactgggcctgtgtttctatccccagctcaatttctcactatgttttcatttgtcagtttatacaaattattccaaaatacaaaattctattaagggccactttatactgaataatagtctctctaagattacaatataaatatatattataaatttatatcttatactatagatataaataatatatgcatagtttatttacattgtagatacaaatgacatttacatggacacacatacaatattcttacattattacaccactgggtatacttataaaagattttagtccatttaaatctttgtgaataatgaatttgaggtagtcacaatgatacttttgatgacacagataaatttagtgatcaaagatgaagatgaagaaaagcctttataggatgctgcaattgggttataaaattaattggatagcttaaattttacgggtgtttgtcatataaccaggcaaagacgtgcaaaacacattgctaagagttgctgtctttgaaggaaagaatgagtaaacagggtataggaaaggtttattttgtaattttatcttttgtatctgtgtgtggtagaatgaattcttttcttaattatgcactcctggctattatttatttttgtgctgtgtgattagcagccttccatggtagatgagatcagctacccattccatgggattaggcttggtcatatgacctgaattagccaaaggattagttcatgtgaaggagacagaggtttaaacaagctactgcagtttgtgccctttcttcttctgggatctctcatacgaaaaataatccagatagttgttccttccaggaaaaagatgtgtggaacgggcttaaacataccctgtgtattttagccaaaacccaagtggtttcatccagaagcagacaaactacagacttgtaaacatgaaaaagaactctgtagctagaaggcactgagttattaatgatagtttgttccattgtattgctttaataagaattcccctaattaacttttctttggtcagatttctgtgttaaggatgtcctactgtgttcctataaaccatgttaactgatgttccttgcctctgttggagtcaggggtggagggacctcctggtgaggaaaatagggtctctggtttgagtgaagacttaacattccagttgggctggttcaaccactttggcaagggaggtgtgcttaccttaagccatgttaaagaaactggcagaataattagtccttcagcaagacactgggcgtttccttcccagaatccccacccctagagtagaaacttcagggctcaagtcatatagtgtcatataggtctgccagtttgcttttctgaactattcagaaaagcatacctttatcttttcttctctctgtttttaaagcatgctttccttgcactttgggttccctctcctccatgtccaacattttgagcttttttactctttctctaaagcttccccctttccctcctgttgtacagctgtgatggtctgacctccatgctgccttgagtaccatagtttttcccttctctcctccattttcctctgggaaggcgttgagattttacctctggcccgccccacagtatttcttctaaactctaataaaattgtcccgatatttccatttgagtctattcttaaattcttttattaatgagactaaagaatgcacaaagggaaccctgattttcccttgtatgagtttgtcactgtcaatggctattagatagttgaatcatatgattttaaagcatcctcaaacacatgtggactgttatgcttactacagcaattcaattatttcattaatgtggggtaatttgatgaaattagcatattgcatgtgtgaaaactacattgtattctttcaaaagcccataaaagtccctaaagttgtcatctagttaattattttcaaaaattaaaaaatgtaaaattgttgaaggatatatacttaaacttaattctcaaatgtttgaaattgtcatcacattttataaacggtgcaattagccatgatgagaaattatgggtatttattggagtagttagatggcaggtatggagcttcggagatgggtggtattacatgcaaaaactaatgttcttccttacccattttaagttaaaccatgcatagtctttctatcattaacagtttttctttaattacatcttcatagaagttaaaggactcttctaagttcacaccatccaagaacagaagagctgatgataaagcttcatgttactcttccatctctactaaattctaggatcaaagtacagcaccttctagagatggaaaatagttattttatttatttatctatcaatttatttacacttatttttgagtatatgtgagagaattgtgtggtgcatatgtgcattgcacacgtgtgtgtgtgtgtgtgtgtgtgtgtgtgtgtgtgtgtctgtgagaaggtactaaggtcagaggagtgtcaggtgtcctactctatcacactctatcgtacacccttgaaacagggtttctcaatgaacctggagctaggttggagaccagcaagctacagtcatcctcctgtctgctcctccacataattctggggtttcaggcatatacaaacattattttaaaaatttgaactcaagtctacatgcttgcacatcaaatgctgttacctatagaaacatcatcaacttagccccaaatagagggtggatccttccttccttctttccttccttccttccttccttcctctttacacttctttttttagttctaaattaggctttctgttatcagaaagccttattaatttacctttgtttcagtcattgccctatggtagataattttagtgattaataactcacttttagttcatttttccaaatttttgtctttgctcacttgccagtttgtagcagcataacaagcttctggaaaacataaattcaacagtttttcatactgttgttttcttattggcttattgatgtgagctaagatttgttttgtgtcttgtttatagtgtcttcgggtcaaattgtgatgttgggtaaggcaaagtcacagctgcttaatgtgtgtcccaatggctgccttgaccaagcctctctctttaggcaacattcccatgcttacactgaattccttgaaaaggaggagagcatatatatgaggttcaaatgcagggctttgtgcatgctaggttaaccttctactacccaagctacaccctcagctttttaatcaattttttaaaaaaaatttaaaaacaattttttcccattttacataccaatcccagttgccactccctccctcccctccttatacctcctcctgctcctcatcccatcccctcatccatactcctcagagaggataaggattcccatggggagtcaacgaactctggcaccttactctgaggcaggaccaagcccttcctccccctatatcaaggctgagcaaggtattccttcaaagagaatgggttccaaaaagccagttcaagcactacagataaatcctggtcccactgtcagtgcctacagactgtctaagccacacaactgccaccaatattcagagggtctagtttggtcctatgcaggttacccagatgtcagttcggagtcagtgagctccttactagctcaggtcagctgtttctgtgggtatccccaaactggtcttgacacctctgctcaaacctggcaccagggaaattccctggaatccacaagaatgaccctagctaagacctgaagcattagtggagagggtgcctaaactggctttcccctgtaatcagattgatgactacctgaattatcatcaatgaatctccatctagtaactgatggaagcagatgctgagatccacagctaagcactgggtggagctcccagagtccagttgaagagtgggagaagcgataacaccctcagcttttgacaaagttctcttataacaattctctcatttatacctttagcagagatatgttcactagatcatcttgacttaacaagagagcctgcttctgatccttgtcaaggggacaatgccccaaaatgtcagatttagacatttctttgagaagcacatgtcagatctttcctgggtggagcacggagactcaggaacacttcaagtgctattgcaagtgaatgctgcagataacctcaccattcattggtgttttccctaaagccttttatgactgaaagaatggattggatttagagatattccctcatcaaacctatgattttactgtacagcctttggggtgcatcaaggccccaaacgaaatcaaaatggttccaatctggaaatagtttgaagtagcggagatttgtaacttggggaagtatcctggctacgtcttgtggtgttatgagggcatcatgtccaccagcccaaatggcagtgggcaccttcatggcagtcaggtcatagatgggaggacgactctgtgtgagagagaacaagcaatcatgaaaagacactgtattagcagcatgtgagcttcaatgaaaggtaagcctgcaaagtgagtatatgagcataactctgttcgacagtgagagagggggaaatgttcccacacaatgaatgattcctgccttcaaggagtttgtgaaagaaatatgcaaggaatgatagctaacgaggcacttgaatacagacttttaagggggttgggttttgacaggtgtggtggtttggataaggatgacccccctccaataaactcttatttttgaatccttggtcaccagttggtggagttgtttgggaaggattagggagtgtagcaatgctagaggagatgtgtcactgggagcaggctttaaaaaggtttcaaaacctaaaccatgtccagtaccactttttgcatcatggttgtgtctcaaaatggaagctctcagtaactgctccagtgtcatgtctgcctgcctgcctgccaccatgcttcccaccacaatggtcacatactctaaccccaggaaactgtgagccccaaactaaaccctttcttttatgagttgccttcatcatggtgttacagtattagaaatgtaatgaagacaacaggtaaccatgtatgctggaaggcctcccagtgaaggaatagtgtgcagactatgaccaggagtaataaacttatgaatggaccaagctaaggaagccagatctcttagaaactttgaggcaaagcagagtcatttctcagagtcctgagttaagacagataaagtctgaattgtgggatgactagagaagggataagtagatgattggtatagtgaggacacagggtgtgggttctctaattaaagctctagagacaactaaattctccaaagactagggggaacctgtggagattctaaggagtatgtcatcgtttaggaggattgggaagatgagtaattaatagaagggaaaaagagggaaaacaactaaacagagcatcggactatgaaaatgcaggacaaggggaattgttccaaactcatagaaagatcttcagaatgtgagaacagaaaaggaaattgactaattaaaagccatgaatgactttaagtcagaaaaagacctcaaatagatttttccaaagttcaagaaagaaagggagggggaagtaaggcttttttacttctatattaaaagacattggagaaacagaaggatgggatgaggatttcattgaataagagttcaaagcaaggcttgtttgcttatgtttataaagtacaggggttccttaaagcaataagagcagctggcaccaaagcactttacagatttaaagtaaccccctgtttctaagtagataaagaaatgtttgagacatcacaattcctgatttcaaattgtactatagagttataataataaaacaagggcatgttgaccaactgaatacaacaaaatacctggaaactaatgacacagctaccgagatgtaaaaaccatgcactggagaaagaacaaccttcccaacaaatggtgctgggaaaactggagggcctcaggtttaaaactgaaacaagaacccatcagagctgcatatttattttccaggatgctagtaaagattcttgtgaaacaattcccattattgtgaacccttccaatttttggtttaaagaaacttttcactaacattgattgtttcttactggaatttgaaataaagaagcaagaataacaggtacatgaagctaatatacatgctaagaaaactgaggtaaaacaaaatatgaatatatttagcacctctggaatgagggaatgcaagcaatttactctcatttgtgtacaccccgttggtttccccaaagttttcatgttacaaggttctgcagactaataactgaaaaacctatcaatacaaatgtcagaaactagcatatagaatttttcttactcaaataagttctcatcaaaattcctccaaaccctcttctcaggtctctgagtatctcacctggttgtagtgattcatattttctgcttcacttccccagtcataagctctgaattcatcagatcggtaaagctgaaatcaatgttttagggaagatattcagggtaagaatcatgagagcctcagtgaatcttagagaaatatcacatggggaggaaaaagggctctatgttctcagaaggaagcaaacttcgtatcaatacagagaatgctgtccaacagagagactaagatggtttttcttgttttggagaagaaactcatggaaaagtaagccccattagaaagccaaatcccacacacttctctcttggaggaaacgtcatctcacttcagggtaccctttactgcagctgagggcactttttaccagttctagtttaaaatggaattcatttgtgtcacatacttgctctctaccttaaaacctttctcctcaagtccagtctcctatcaaaatctggatagacaacaagtgccaagatggagacagtttgtaagtgtctagagacgagcctgttgatagggggagttataacgtttggcatgaactgagacaaagatgggcctgactttccatgacaaagatgttacctgttttatatgcaggatgttctgtattgatgatcctgtgggagcatgtgacatgtatacatccagtcggctctaggaagttaaaaacagtcatccaaggaaatgaaccatgtgtctcagaaagacagaacaattaagagtttgtaacaaatatgaactttgctttcaaaaagacatcaaaccatcactgaatatgtgtctgtgtgaaacatctgaatatgagcagacctaggttgagctgggcatgggttttctgaggaaaaataaatatgcactaagtctaaatcctggtgcagggcaaaacaaccaggtaaagtgctatgtgcaagcataaggattgtatacaggtacaggcatgctatgtgcaaagcatgtgcatactgccacagatagatcacagatcctgggtttcaggtttgcctgttgttagttatcatctttaggactctggttaaattatgtaatttgagttttacctttttatctacaaaataaatatattaacttagtagatgtggcactgggtggtagggataggaagcagaggcaggaggatcattatgagttcaaggccaatctaggtcacagtgtgagagcgtcaccaaaaaccatacaaacaaataaataaatgcattaaaaatcatgctatcaacctgctaagttcctgtggagagatacattctacaagaataaaggaggaatccttccaaagtttgctttactctttctggagatcataggggcaaaatgatgcagttaaataataaccgtacctgtaccttagatattatgattcatatagagagaagcttttgaacatcctaactcctgaacaaggagtccttgatcagtggttcctcatgggtatagcctttgaaaacataggaatgagatccaatggtgaacagctcttttggaactgtcttcacttgaactgtctgtattctttgtaattagcaattgccacattatcattaggatatatagcaggggtagctatgcaaccactctactagacatttccattctgggctagacttctcacattaagcagtgaattttgtttgaatccaaaattgtgaattaatggctgcacccatgtagtaagtgtataacttactcaaacttctcctttcctagaatttaaaatttagtttaattcaccaaaatgaagtaaactgaaatcgcattagtatcagcagcttacaagcatgtgggaatattcttagcactccttaggaaagtgttaagtctcctaactttgacagacaatggaatggaatcttttcttcccctgtactcatgttcatggtctgttgggatatctaatccttcatgaatataaaatatctgccttcaaggacttgcaacacctatgactttatgtagtataatgaaatatgacatttctttaagcatcaaatggccacttagttcttatacataccatattcatattttttttgttgaatccagcccacagggacataaactcactacacattggtcggagtatctttctattgcagactttgatgtaagttgcctttgccttcttatcttctaaaaagaaacctttggtaccaaatatatgctgtgatataataaaataaaataaaataaaataaaataaaaaataagtgtgtttttaagatgtctccgtaagtaccttgatatttgcttaattatatgaatgaaccaattttggaaactatatacatttgcatttattttctgtagtcaaggagacaaagtcacttagaggagggtagttatctgtttccaaatgcagaggtcataaattgtaataaggagtctttgtccccaaattcacttgtccatggtggatctctcctgtaatctgtctaatcatcgattaccaagtttttgttcagtggtaagaaagaagaaagaggatttcactttaagataaactcttagactgaactggaaggacatgtgggttttatctatatttttcatatgcacattggctgtgttttactgccctaaactaactattcttcatgatgaaaagcagagaatgaaacacctaagagaatttggtgctggccatcaaatatattatgatgtcacaaggatagcatgttaaaacattcagggcttgtgagtgtaagcttggacagatctccagtgtagtccaggatctgcacagaaaaccagtagtgagggaatcagagagttgggtcttaaagaggcaggacctttgacaatagggaatgcatacagataaaacacaaacattattgggctcatatgtgatgtgtataagaagaacaatgcattttataaaactgatgttatttatagatggatgagtctattccaaatgtcattaacaaacactttactaacttgagtgtggtgatacaagaattagaaacaggagaagtgctataaattcaatgactgtcatattaattaagtgtgagcctcaaaagatcaacaaaagaaagaaaagaaggaaggaaggaaggcagatggacaggcagataagaaacaaattaattcaatcagccctgcccagatgtagatggtagtcaaaactaactgatgacaacatattttgaaatagttgttacatttccctcggtcaaagtaaacaaggcagtgaaaatggcatgtaaccagtcatatgaccacaggaaaatatcttccatgtttggaagatgtatttactattatttcctttctttcatacaactctgtcccaaagcagggcctcatcttgttttataagaattattgtgattgtttaatttgctttctggtttcatttttgttttgttttggtttttggtttttcaagacagggtttttctgcatagctttggagcctatcctggctcttgctctggaactcaggctggcctcaaactcacagagatctacctgcctctgcctcccaagtgctgggattaaaggcatgagccaccaaagcctggcctgatttcatttttgtacagatttatttttataatcattccaaactcaaatgacaatgtcaacaaactattaattttatccttcaagatatgctatttgtggccatgacaacgagaaacctagaccaacagaagataaaacccaaacaactctcaagtaaatggaattccaaagccacaattattaattgaacaactattttgcagcttaaaaactaacagtatttaaatgtatacttgaacttggagttatttgtggtgatatattatttatgatttaataaagcttgcctcaggttccaggatacaaagccatccacaagctatagaggtgaggcggtggtgatatacacctttaatcccagcagccatactagttagctatagaagctagctaacacacctttaatcttaagactcaggattaagaggtagacagatctctgttagttcaaggccacagtgactacgtgtaattggtccagtcctaaaagaaacagctcacacaaaggtgatctcagcacctgggatcacacacctttaatcccagcactagggatgtggagacgggaggatatggctggacagagaaaagaataaaagtcagggggagacaggatctgagagcttttgcctctgaagattcgtggggacaggattgccatttcagctgggtagaagtaagatctactggcttggttgctttgcttctctgatcttcagcttgaagcttgaatccgagtattagtctctgggtcttctattatttcatgctacagatattgaagtactgggataaaactgggttctttaatgatcagtgtaagctctcacatggaaaaatatatgttagtaaaggttttctaatgtcaaactaagacattcttaatcatacgtgatttgaagaatatcttccaattggacattgtgaactcactgacccacccaactaaacagaacaggaaaatgtatgaatagataataaactggtgtcgaacccagctcggctgaaagtctatgcatgcctctctgtaagtgactgaatttagttaattgtatacggtacctacagacaccagggacacaggcatacacacaccggcacacacacacacacacacacacacacacacacacacacacacacacacacacacacacacacacacacaggtacatactcatggactctgatttctatggattttgcctaaagttcctacttctatttcatacagatttaaaaataatacggatctatgatacaagatgagatcctgagataaattttggcaaaacaaggagcctaccttgattatggaatttggaagtaggaaaaaactggtaaaaatgcttgtgggatatttgaatgagatcacaggacccatggcaaaattcattttgattctttgtgccagttcaggcatggtggaaaaggctataaaccctgggagaataggagacaagacaatcttgtaaaaattccatatactcatgcaaaattttatcaatgggaatgagtgagattctgtgttgctgtactttatcttcctacagcagtgatcttggagagaagctggaacaattctctgagttgttctgcctagataatatgacagaaggtctggctagtccataactttttctaatactattgctagaccacttaactcatttaggaaaaatagtagtagttggtgggtaaggggtaatctggtgaaacagctactgcttggtcaactatagaaacttcatttcctaagcatctaagcccgttggtcacgcacaattttaagttgttcagtgagtcacagagattctggaattaaatagtcagttcacaagacagaaatgaagctgttctttctgcagctattctgcaagctgcctttcctgttacagagtaagatttgattgtcattgtctttggtgtcttgctggatgttcacactccacccccacactttccagcttcccagagtgaagatgtttcccttggatacacagtgatatcagtaagacctctgtatctccatttgctctgctttttttcagcagtgacatgacaccatgcatatccctgtgaggataagggtaaggatcagtactgcacccatggaagttacaggggttatctgggcaatttactttcccaagatgcattgctatgtccctgctggagatacactcacaaacacacatagaaatacttgctgaaatgttaacactgtttgtgtcattgaaattacctgagcaactgacactgtgccaggtagacaattcgtattcggagcatgtttggaaatgtgtggaggttagttctttttttgtaccactggcaatgcactttatggtggtcagacatttaggtactagggtcagggataataaacaacctccaaatggatccttcccttattttaaaaaattctaccctaaatgcaagaagcatttaatgaaacatgctcatgcccacatgcaacaaggcatgattgtctcatttgcagctcagtaagggtaagtcctgttcacatactgagttgcaagtcaagtcctttgccattgcttctgatcccattggtgggctccaaccaacttgctctgaatttatgttctgtatcagtgggattgtttgggagatgaggggaggaaaaatactgaacacagatccctaaacatagcaaatgctcaggaagtactagatagaattatacaatggtccagcttcatttgggttctcttattggcatgctgataattttttgatctgtgttctcctctgcccacttcctctcccaggcttgtgaagggctatcagcatgaagaactaagcagcatctcttttttggtgatcaatagtaatggcagcaatggatatacttacgcagtttggaaatattatgagatttattgtttcttgcagttttacccaacctaaaatgtcacagcttctcatgactaattctcctaacattggaaatttcaatggaagatcagtaacaaatccaaatctatgtcaatatcattttcttttaacttttatttggaaaaaacaacacttgatgattttttcaaaatgtctgggtaaagcttagggtgggtgtgtggctcagtggtagggcccttgcctataatgtctgagtccatgagttctagtcccagtgttgcagaaaaaatataaccaagtgtcaagaaatcataatattgcatttaaaaatagagagtaagttacataaatagatatggctagttgatttattagagtaagtttttgtgtttcaactcacaaacaaatgtgaccaagtagtttccatttgtacaaattacagttgagtcctcacttttcatttatttagactgtctctgagtgtgagacagctgggactcatgtggattgtgctgtttgcccatctgttgatttgccttgttgctttaagctttgtctttccagcataaagggggggcatctagaaactttatctttagaattacttctctggagtttggtcacaaactatttcttgagacttatgtcaccgtaacagttgtgtgtgcggctgtgatccccaaatgagggaaagattgggtaggctcttcatagtcatagcttctggactacagtttcacagatatacagagtaggagggttactctcagcacaggacagagaatgaagggcaatataaatggcaggtgattacttagttccaacagagttgtgacattagcccttgtaaacatacctattgtagtgccgagtgaatgtccaatgaagtacaacttctcttgacctgttttattgacaatgaagtctattatccccgggaggtcatatttggccatttcatcaaagctgtaaatgaaacaacatataaatatagttttaaaactcaggcacttggttgattctttttcacataggaaatctgtgccacctacttacttggtgtgtatataattattcactcagttaaatggatactattacaacatttttttttgcatttttttctgcttattttctgatagcaggaatgaccaggggagtaacatatactctctcaagttcttcattctcattccttatattcctctttgttcccctttcttgctttcattctctttttttgcttctgatttccctatggtatttatgactgttattcaatatccatcactgttgtcatttatgattctatcattcgctaactgagcaacattagagaagttatttacatgttatgatcataagtatgcccacttggaaaatgagccaggagttactgctttataggactgttataggtcttggtttgtatggaagaaatgacttgcctgttagtaggtactttatctgatattgttattgttaatacacacacacgttaaatatcctataatagcaatattaaaatcttatgttcatctagcatctgtagaagagatcaaaaaggatgatatattcagtaggatcaagtaccccatgagcttgtaaaaagtgtacatgagggaaccaataaattggtacaaccaaatttgagagaattgttgtggtacctcacagagaaacacttccaagctttctgccaaagattagagatataaaatgtttcctaaattttgccccttcacacagctttagtccaaaaaatgtattcctttccttttctcctccaatcctgttcatggagaaatgactatgaattggtacaaaaatgatgtgttctctattctaacagcaggatgtaagtcaacttggtacttaggtcctttggaagggaagggaagtctatgggggacaaccctgtcctctagtgacagcagaaattgtcaaaataccaaaaaactttttattaactgttcattaacattttaaaatgtcatattggagttttttctaaaacagtatgctatataatcccttctgtgggtctctctcctttttttcttgttgctgttatttatttgttatttgaggtacagtcatgttgttttcacaaggactgaactatggctggtctggaattcacagtatagcccaggctagcatttaactcctggaaatcctcttgttttcccagtaccggcattacaagtataagccaccatacctggcactgtggaatataatctcagctacagtttctttaaatgaatgtaacatgacttgatggattttaatgattccttcatggaaggcctcaccctccctggggagtgaatgggagatgagatgggggcttgttggggggtatgggagtattggagggagaggaaactgggattgatatgtaaaataagattgtttataatgtaaataatatatatatatatatatatatatatatatatatatatatatatataacatgagcataattttagcaaaatggattgcctaagagaaaacactacttaaaagtactagtagaattaattctgctttctgcattttcttttggatatgttagaaaccacagggattttataacctgaaatattatgtgttagccatgaatttgtatttaaggaaacccctccaaattttcatagatttttcttagatacagtttacctaaaagcccagaatttctcttcatttgctgagagagttttgtgtcttcttgaccaagtgttcccccgactgtttcccatccacacatcatagcctgcatctgctagaaggaacccgaggcttccattggcgaaattctcaagccagtaggcgttgtctgcaaacaaggcatgctgcatatacacaactggccgggtacctggacaagggccatgaagaaagaaaaaaagaaagaaagagaaatttatagccacacacacgcacgcacgcacgcatgcacgcacgcacgcacacagaggcaagcacacacacgcaggcacacatgcatgcatgcacacagaacataccgtttctcctttgtcactagtgtattagtttagagtattaaatccgcatgaatagctcttgcagcacatactatatcctggtgctgagctgactggtgtgcatgcatcagcttcttgacttcttaggacaaattacaaagtagtttcaattttgagggacagtttacggatgtgcaaaccaagctttccataattaaatagctttcctaaatggtctctttagtaacaagtttcagagcagaaacttaaaactgattgtgtctcatgccaaagcacacatctgtgactgctttgctttatgtgtgcatttgcagtcaccactctatgatgcttacagtttttcaatcctaccacggtacaaatcaatacctgttcaatataaactgtacttcaattgcaattttgatttcccctccccaggctagaaggagcaatataatactatttctagatgctacacagggcagacttgtccttcaccttctagatagtcatgggatcaccagtgcaaagtactacagtgcactgtgtttttgatcagggagcaaaaagagaaggagggggagactccaggggtcagccacccagctacactgcaaggcatgaagtaagaagtaaagaaaggtatatagaaatagagaaaggtaaaagccgagagacaaaaggtagatgggataatttaagttaagaaaagctagctagaaataagtcaagctaaggctgggcagtcataggaaagaataagcctctgtgtatttatttttggagctgggtttcaggcacctaaaaattaaagagcaaaggataaaaaacccaacatacaaggtagtgaatgttcagtgagatgagagaactggggctgatgattaaaacaaagtaaaacaacaagaacagcagcagcagcagcagcagcaactagcacaataatttaatgactgaaaatataggtcctggagtcagggagccaaatttaaattctggttttgtcacttgttgtttgcatgactttgtgcccggttcagaagctgcctttcgccatcatctgtaagtggagacagctagtgtttgctcagagtttaatacgtagaacaatacagccagcaagcaggttgtaattccacaccttttcacaattttctctccttaaatttatccctataaaactcttctctccatacccttttctccctcaagtttgttgcctgatttaataaaaacaaaatgaaaaataaacagatccaggatgttattcttatttgaaatgaaggtaacagggcattatttagggtatacccatcacctagaatagatcttctattaaatgtatttattggtttcttgacatttagatctaacttggaaaactatattttgtatagcagaattgctcacatgccattctgggttttcatttgaaagctcttgaattgcatagtcctttctcagaggggcagattctaaaacactgattctggtggttttggctgccattgaatatggatggaggaaaagaagctgcaggaccaacatggtaagcaggtgtcaatgactattcccccccccatgctttgaaaatcttttgtttacacttatttcactctctgcagagagtagctgcaattagctttctcttttagagtgtaacttctgtacttctgcatgtttggctctttcatttcacaaactgtccctgtgattatggttgcctgaatgttagttttcattcttagagaaggcttcagaaatgtactgttattcaactctgtgataagagaagagacccattaatttctagagggataagaggaggcaactttgggatctcactagagtcaacttcattcagcccgaaaagccagtaatgagttaataattaccaccttggtattcacacctgaggcaaaggcctgattttccttagcaagatctatcttgccctttgagcctttagagaagtagaaggaaaataatgagcctccttttttgccattaaaagaatactgcagtaactcaaactgatttgaacaactctgtccctctcccgatgaatacttagcattcaatttcagtcatgcatctttctctccaagagacaaatctcctgtacctgtgagtccagcttgtgcccttccatggggaatcctgttgagggtgagaatgtacccatctgcagtggtgacttcatactcttcactggggtagccgttgtagatgatgatttcactctgtagtagacatagagttatttgtagctcttcctttcaggagacaccacaaagtgactaacaagtttatggggtagattatataaaatctatagccataggtagttgtaaaattaaatttattacacaaggttttccttcataaaaataaacaaactgctagaaggtatctactaaaatattggggatggatatttagcactgacctatctgagtaggctatatttccttgttatttgtcttttgattttccttttggatttaaagatggtaaaatcccatgccaggagaatgctgttgtgaattatccaaatggcattaatgatatgaatttaaaagggggattgatgactataaaagatacaacatgttctgcttcttatagctagaaaatatatatcagctattaagtcaaaggagctgattaccagcctgaaacttgcaaaaatgttataaactgtttatctcatccaagatttttcctacagcagggctgggccttttacaatcccaccacccactaatccatttttatttgaagtttttggacttacagtattcatccacacttccggattcacttcattttccaaatcgaagagttcactaacacttaaagtttcatgtatcaagcaagttgttgttaaaaataaccacatcataggcatgcctggcacgaaacattgaatgtttatgggttaatcttatccatctatgttgatgactaaaattaaaatcgtaccatgaggaaaactcaagagaacagagaaatttggtgctttatgggagaaacaaatacagtgaaaattacttggagtgtcatcttaagccaatttgtaggcctttcaaattttgtttcaattaagatatttataagaccttgttgttgttcagttgttagttcagaagacaagttttgacaacatggcaaattaaacagtggagtcgtctgtatccttgcctttcatcccacagagcatatgggaacaatgaacagatggagtttccactaagtcatcaaacttgtagtcagtttctagagatatgataccatgtacatttttcaaagtccagcctggcacgatctcatatgtagtcatactcgattgtcatggtttaaagaatcatagcttcaaagacagacccacaacatctgagcaggagagctcatctcctcgatgctgttaaaatcagtcaccctgtacttgaagttcagtctctaaacaaacaagctttttgactgtgggtaaggatgctaatctctatgagtcttaggtttttgttagtagcattaagataataatatcttgactttttcatagtgacagtgatgattaagggacacaacagacataatacactgcaatgtaaattccttagaaaagtttctactatttttcttattaggatgagcaagaggctgatagcagaaatccattaccatatccagttaatgtctaaattttaaaagcacagtctgcattcatgcatgtagtctcttatactccttacatcttctttcaaatcctatctatagatattatatgtaatttgaaaatggcaatagcatctattgaaagcttcaaagacacagacttcatgtttaagttgtgttacttaaatatagagaagctccataaatgtgctactaatacatcctcacaatagcaaagcaaagaaaggcttagagacacttatgatctgcccaaggtcacagaaccaacaggtgacaggtctagaatgggcatgcaaacagcctcactgcagaacccttgcaccttgtggacactcttatctgactccttgttgtgatgaatatccatcttacctagttaggtgagcttcccctgtccagaggacttccgaacttttgcttttgacatcaggctgaagagtgagatacagctgtagtgacagttagaagctagagaagtgacaaacaggaagctggtggaaatgaggaaaccttggactatgacacgcccaaggcgtctccccagcacaccaaatgagtgatgcacttgtagattgggaaatagtggtctacatgatgccaaataaccagtttggctgagtctcactgatgtttgcaggtagtatctgtcactcttgaggggaatcagcaacctttttgtgccagtgcttcacatggggaagcataatgagctcagaatcctattggacaaaatcagataacaggctctcccctcccaaccctacagcatcatcagcatcacgatgagtatccacagaaacaatgtatgaaagtactgtcatcggctgtgtagtatgtagggaagcatgtgactatgagtcagttgagatgcaatccaattcttgacataagaccagggggagtgtggtagaggaaaccgaccgacatgtcaaaggactttgacctatagtaaactttggcagcaatcaatttggttttggatctagaaaacatctaactgccttcttagaggtagagatgtatacctaaaaaagtgaagacactttagctataagttccacatgagcaatgctaaatggaggtttgtgtgcttcaactttctgtgtcttcctgtaaacctacagaaccgaaaccagcactgtacaagcatttctatttggtcttcccctgaaatcctttcaggaatgaaggtattatccatatttgtccaaatcctaggatccatttcagttgaatgggaaatttcaggccaattacaccaatgtggagtaaaaggtgagactcagcttgttggaacaagaagagcttaatccctactccatattcattccagttttgataaagaattcaaacgtgttttgttctgattgacagcatgatggcaaagacatatgcatttgtttgaagggcgcatagctttagactattaattacttctaacaaacttttatgaactttttggaagttccaggaagcacaatactggttcttttttatttatttattttggtttgcttttcgtttttcaaaacagagttactctgtcttggagtccatgctggcacttgctctgtagaccaggctggcctcgaactcacagggatccacctgtctctgcctcttgagtgctgggattaaaggagtgctctatcacagctcagcaggaagcacaatatttttagtgttgatttgttgtcatgactttgcatacagagagcatgactataattcagttcctcaagattttatagattataaacttgtttgagtctccaaaagattttccatttgacttatattttaataatctgaggaattcatattgttttgcttgtatagaaaaaattatgccaaataatttagtataatcatttgataacaatttatcacccaacttatataatcttgtttttaaaaacaagtattcaatatttaactgaacattatatatggtataataacagtgtttatgatatttcctataagtattaatgtaataatgactactatgtaatattgaatatggttagatagttcaatcatattagttttgatttaaatgaactgaattgaaacattttccttaaccctatgaaatataaaatagtagctagcctctggtctctaagagttcattttttctctacaactagatgatattagagctggaaagtaattgtagataaaaaatttaaaataagaggcagtatttaggaaaaatttatgtactgtttctgatagctccatcaatgaatcctatcacagcccagcaaattgtttaaggaacactgtccatatattgaccaaaacgtctaaaaacatgtgtatcctggcccaaaaatgacatttgccctgacaaggtttacctctttttttgttttattgtttctttcacatcaaagtcttgcttcttttctcttctgagaggagaatctcaatggcttcaaattcatggttattgtacctctgcctaaaggccatttcttaaggaaaattagtctttcttaagggtcatagttttatcttgattataactttaagttaaaagcttaagtctcattcatatacacagtagaaattcatgggtattttgaaaaattcactatgaaatattatgcctttgagacaaattttctctagagtaagactttacattatcatactctaatttgtggagctggttttggtgtctttcttattaggtaatttattttctatgcttaaaatcagatagggctcagtagcagcataagtatgcataaatgtgtattgcatgcatataaatgcttaattagcacactttggttagtggaaaaatactttatatgttagaatttcatttctccattttttatgtgtagcaaagctggtaatgttcattatttataaaataaaggattattttgagacttctaatcaagtgacattttttaaaaagttagtgacaatgaatttgttgtttttcaccactaacgttcacacatcttcaaaaataatacagccatgataaagaaacataagaaggaaatataaataataatcatattgatcataaataatgaaaacattaaaggatttttaaagagactatagcataatcaccttgaacacattcccatccccatataaatggtccaaggaaaaactcacatttaaccatgagttaggactaaaatgccagtggctgaccttagtgtcaccaatgtcttggtagatcttaggttcaggattgtgcgtatggctaaggccaaaggtttgtgagaggaagagcaatccttctcctccaagcaggttcacctacctaccttgcttaattcgtacaatgtatgtatggcattctctacagctcatgggtgtctgaattcttgtaggcggtgtattcaaatggaggtccccctcatacggaacacttggccaggaattttgattgagtatggttttgtttacagtcttacccccttttggtgataataaattgtaattggtatatggagagagataacactagtttcttagttacctgtttctatattttgtaacttcatattttattttataaaattaccgagagactaccttgcagcatccttattatccctagaaatattatccctgttttaggaccagattatctattttatctctccccaatcgccaggaccatcaaaactttgtgggttgagtaagtgaatgaatgaatgagtctagaagaccagaaaaggagggttaatgactgtcaataaaaatagattatgatttattcaatacttccaatgagtcaaatatcttactttgatattctactaacttggccataaattctcctaaatcttcctgcttttcaacatttcaatgtaaacctttctaacattatataatatttaacccatgaggggatttttttttcaagacagggtttctttgtggctttggaggctgtcctggaacttctctgtagaccaggctggtctcaaactagcagagatcctcctgctcctcccaagtgctgggactaaaggcatgttccaccattccctggcccacgaggggaaatttatagtcaaaataaataaatcagattctatgttttaacaaaactaacattattttaatagagtgcatcaaatactactataatgaaagactactacttggtaacatctatttctctgcaactcacctccaaattatcctcttaactcatgactgctatgacacatgctgacctttcatgaactttgtactcatatgggaaaaagactgatatagatctttccatagttttattttttcaaatgaaaattgtgtcttttagcctacactctgcagttcttatgaattcagctgcatgactcagcatgtgtacatacatagtcgtttctctaagactgacacagctcctatcaggatgtgttccattgataagccatgtacaccaaaagaggaacctctctgtgaaccttttgttgcctcactatccacccttctcttgccaaaattgtatcttatttataaggacatacctgtagatctcttatttatgtcaagagattcttgagaaatgagcatttgccaaagatgtattaattacaggtcataaaattacccagctcccatggaactcagccaagcattccctaacagtaggatactctaccttaattatgtattgattgttgactctgtatctaagtgatggggaatgtaattgagttacaagacacacatagtatagcagtcaagaagtagtgctcccatacaagtctcataggaaatagctaacctttaccctcctttttgctctctgctttttctttgtttgttgacactccagtacttcctatacaacccaggtcatcttttacttcctctgggatgttttcttggagtcttcagctttttatgctaatttcatgcctgatcaaatctagcactcatagcacctgtacagacactcacaaatagtctgttagtctattgttagtgtatattgtaatcctgttactttttcatgcatgtggttgtatctaaacctaaatgcccaacataggaatacatagaaaatcattatataaccagaccaatttgttatttgttctttgattttgaataccttacttatttttggtatttagatttttcttatccaaattgtcaaaacctaactttggtaaggaccaaatgtggcaatgtatgttctgtatgaaatttaacatatagtaggaactttataaatattaacatcttgtttctagtcaccttcttcctccaatagaagagccctgaataaaatatttgagtctatttactaaatggaataattgtttgatttataataatattctgtggtcaacaattgcatcaatttattatgtagctaataaaataaaaatataattatgcctatgaaatcactttgaagtcagtatatgagtgggaacatcttccccagtatattctctgccattatttgtagaagctgcagtgttttgacaggaaggccccacggagatcagttcattgtgatgttttaagtgtgtctgcttgacatcatattggtggtggctctgatagttggaaccaacattaaaagggttgtgctggaagaactctttctttctttctttctttctttctttctttctttctttctttctttctttcttccttccttccttccttccttccttccttccttccctccttccttccattcttccttccttctttcctctctttcttttctttattgtgataaaaatattcatcttgtctggaaaggttattatgtaaatgtttaaatttcttaaatcccatcaaaatttatacttataatgcatacatgtttcacaatttttcttttgttgaaaatggatttttctcctcacatcatataacctggttatgctttcccctccctctactcctgccagtcttcccccaccccacccctccaatccagattcactcctttcctgtctctcattagaaaatgaacaggcttctaatggcttataataataaaatataatcatacaataaaacaaaactgacacattggaattggacaaaacaaacacgattttgaaagttgtgacaatgtctgtgtacagataaggagcattaggtgtgaggataaggaaaaagtaagctttattgtacaggatatgatctctgaaaactgaagattccgcaatgcatagcagtgaggaagtcttctgttgaggttgatatttttccactgatgcagaatgcagcctcactgaggagacacacacagggttaagagaagatgactgctttatcttaggtgctgtggctgcagaaaaactatcatgattttcctgttgacagatccatcaaatgaatagcaaccaagctggcagacctggacctggacctgatccctgccaacctgacttgactcagaatttgggtgtcttactttacatatgtatgtcatgttttttttttttttttttttttttttttgtgtgtgtgtgtgtgtgtgtgtgtgtaactgtcttggcaatacccatttctttcccagcctctgttttcagtttgaccatgccctttctctttgcctcttgtgacatttggtcagagtatttctgttggttttgaatctattcccctttctgctcttgctcactgtcctgattttctgaggttttctaacaacaacgtgttctgtgcttctttacttaagacagtgttttctggcttcctcatatggagagataatgcaaggaagtaataagagcctaggctttgggttcacgtaagttttggttctagaactagatttgatgccaactcttacatattaaacttaaatgatataatcatgtatttggaccataaatactaattattggttttattactatttcttgaactcttgattggtttttggactcaattaaaagaataaaggcaaaccatgggttttacctatttcactccatatctctctccagtgacactctaaatgtgcattagttttaagtattaatgacataatcttcagttatcacctggactgagattataaacatacaatacaattaaggaggagtctgactccccgagcccttcacaagggaggatcatgctattgaaaactggccaaatggtacatttttttctcttccagaagatgttggattgcatatccctgaccatgtaatttaaaatcaactttaaaacattaaggtgctatgattggtggcattgatgataatgtgccatggaacaccaactgaatatatttttggtttttacatcaagacagaatttttctatgcatccccagatggcttccactcatcacatagcctaggctggcctcaagtttatagtcatccttctgttccagtctctcaactgttgggattgctggcttgttccaccaaaaccatcttgaaattaaattattaatcaaagaagaattttcttaagatatagcaatggaaatagaatcatcatacttgagggacccgaaaaacatctgtggttaaaagtccttgctgctcttccagaggacaccagtttggttccagggacctacagcagctaggtcattaactgcctaaaattccatcagctaggtcattaactggagatctgacaccttcttctggtgcctccactcactcacatacatatgacacatgtactctctctcatacatacacagaaataaaaagaaacctttaaaaatcctgtttgataaatgtaacatcataatttatttcattagaatttatttggcttaatatacattgtggacaaatccctgctcaggatgagaaacttaggtgaaaatacttaagactacaaacccaattcagtaatcagtcaggatgccagagtaaaagaccagcttttgccccttcttccatgacataaagctaagtccacaaggatgtgactacactttgaggtagatgactataacagaacattagagttctatagtacaagggtagatcaaggagaaattttataaaacaggaaaaggaaagaatggccttgagagttggctaagcagtaaacagtacctgatgctgttgtagaagaccccattcaattcccagcatccctatggtctctcagtttcacagctatctctaattccagccccagtgggaactaatatcctcttctgacctctgagggtgaaggcacaaatataatgcatagacacacatataggcaaaaaactcataaaataaacaaaagaaaaaataaagaaaaaagacaaagaaaaataataataaatgaaagtcccctcttccaaatagaaactcctgaccttctgctattactccatccctaactcctcaaagtgctgtgtcttgtgctccattagtccaagaagggacccctggcttaaattttacatggaaacacaaaagacccaggatagctaaaacaaccttaaacaacaaagacagggatggcggcaacatcatcccagtttcaagttatattacaaaggtccagtgattaaaaacagcatagtactgacataaaaacacatagattattttaattaaatataattgtgagcctagatataagttcacatgccaacagcactcaaaagctcaaaaggccaaaaatacatatcggagaaccaattgtgctgatccaactggatagctacatgcagaaggatgaaactggggccacatctctgaccctgcacaaactcaaatcccaatagatcaaagacttcagtgtaagatgtaagaataccccaaacctgatggagaaaaagtatgtgcttcaaattatagttacaggaaagtactttttgaacagaatctttttagcaggcattcaaacaaaaaattgacaaatgggacctcatgaaactaaaaaatacttttgtatagcaaaatataccagtatttgaatgaagaggttgtttaagaatgtgggcggatcatgtaccagctatacctgtaacatacggttggtatctgttatactaaaaaaattaaaaaccaagaaaaaagttaaaaattggaactgattagagttctaaaaaagaactacaaatggccgagaaacattaaaaatatattcagcatccttagtcattaaggaaatgcaaattaaaattactttgagattttatcttattccagtcagaatgactaagttaaaaaaaaaaaaaagacaaaaaaaaaaaaaggtagtactgctgttgggaaagaggaacacttactcattgatggtgggagtgtaactggtttagctactatggaaatcagtttggagatgtttaaaaatatctagaattatatctaccatataatccaggtataccactcctggacatattaccaaagcactcaatgttatacttcaggaattcttgctaatccattttcatttatttatttatttatttatttatttatttatttatttatttattagttcaagttagggaacaagcttgttttacatgtaagtcccttctccctctccctcccctcacccccatccctcctcccaccccccaacctacccccaccccatccacccaccactccccaggcagggtagggccctcaatgggggctctgcaaagtccaccaaatcttcctgtgctgggcctgggcccttccccatgtgtccagggccagagtgtaacccttcatgtgggatgggctctcaaagtcccttcttgcaccagggaaaaatactaatccaccaccagaggctccctggagtgcagaggcctccttattgacatccatgttcaggggtctggatcagtcttgtactggcctcccagacagcatctggggtcgatgtgctctcccttgttcaggccaactgttcctgtgggtttctccaacctggtacagaccccttcgctcttcattcctccctctcttcaactaaattcccgatttcagctcagtgtatatctgtggatgtctgtctctgcttccatcagccactggatgagggctctaggatggcataaagagaagtcatcaatctcattttaggggaagggcttttaggttatcctctccaccattgcctggattgtcagatcgtgtcatccttgtaggtctctggagatctccctagttccagatctcttctcagacctatagtagctccctctgatatggtatctctcatcctgctctctctcctctattcttcccccaactcaatatttctgctcctccatttcccatcctctactcctcttctcttgctcttattgtggcagctcccttccccctaccctcatgctcccaattggttcaggagttcatgccactccccattcctggggaccgtttatcccttagagtccttcatgtttcctagtttctttggtgaagaggattataggctggtaaacctttgctctaagtctaaaattcatatatgagtgagcacataccatatttgtctttttgtgaccgggctacctcactcaggatggttcttctagttccatccatttgcctgcgaatttcaagattccattgcttttgtctgctgagtagtactccattgtataaatgtaccacattttctcaatccattcttcagttgaggggcatctaggttgcttccaggttctggctattacaaacaatgctgctatgaacatggttgaacatagtccttgttgtatgaacatgcactatttgggtatatacccaacagaggaatggctggatcttgaggtagattgattcccatttttctgagtcaccgccatactgatttccagagtggtcttacaagttcacactcccaccagcaatggaggaatgttccttcttctccacatcctctccagcatagattgtcattggtatttttgattttagccattctgacaggtgtgagggggtatctcagagttgttttgaattccatttctctgatagccaaggattttgagcactttcttaggtgtctttcagccatttcagattcctctgttgagaattctctatttagttctgcaccccactttttaatttcattgtttggtgttttggtggctagcttcttgagctccttatatattttggaaatcagtcctctgtcagatgtgggatcgtgaagatcttttcccattctgtgggtggtcgttttgtcctactgactgtttcctttgccttgcagaagcttctcagtttcaggaggtcccatttattaattgcagacctcaatgtctgttgctactcatgtaattttcaggaagtggtctcctgtgcctatttgttcaagggtaattcccactttctcttctagaagattcagtgtggttggatttatgctgagatctttgattcatttgcacttaagttttgtgcatggtgacaggtatagatctatctgcaattttctgcatgtccgaatccagttgtgacagcaccatttgttgaagatgctatctttttttcccattgtatagatttagcacctttgtcaataataaggtgttcgtaggtgcgtgggttaatatcagggttttcaattcgattccattggtctatctgtctatttttgttccaataccaagctgttttcagaactatggctctatagtagagcttgaagtaggggatggtgatgcttccagaagatcctttattgtaaagagttgttttggctatcctgggttttttatttttccatataaagttgagtattattctttcaatgtctgtgaaaaattgtgttgggattatgatggggattgcattgaatctgtagattgcttttggcaggattgccatttttactatgttaattctacctatccaagagcatgggagatctttccattttctggtatcttctttaatttctttctttaaagtctcaaagttcttattgtataggtctttcactttttggttagtgttaccccaagatattttatgttgcttgtggatattgtgaatggtgatttttccctgatttctttctcattggatttatcatctgtatatagtaaggctacttttttttgagttaattttgtatcctgctaccttgctgaaggtgtttatcagccataggagttcccaggtagagtttttcgggtcactaatgtagactatcatgtcatctgcaaatagtgaaattttgacttcttcctttccaatttgtatccctttgatccccttttcttgtcttattgctctagctagaacttcaagtacaatattgaagagatatggagagagtggacagccttgtcttgttcctgattttagaggaaacgctttgagtttctctccatttagtttgatgttggctattggtttggtgtatattgcgtttatcatgtttagatatgttcctgttattcctgttctctccaagatctttatcatgaagggatgttggattttgtcaaaggctttttcggcatctagtgagatgatcatgtggtttttcttttttcagtttgtttatatggtggattacattggtggatttttgtatgttgaaccatccttgcatccctgggatgaagcctacttgatcatggtggatgattttcatgatatgttcttggattctgttggccaatattttattgagtattttagcatcgatgttcatgagggatatcagtctgtagttctctttctttgtcatatctttgtgtggcttgggtatcaaagttattgtggcctcgtagaaagagtttggcaatatcccatctgcttttattttgcggaacagtttgaggagtactggaattagctcttgtttgaatttcttgtagaattctgcagtgaagccatctggccctgggctttttttggttgggaggttttgatgactgcttctatttcattaggggttatgggtcgatttatactgtttatctgatcttggtttaattttggtaagtgatatttattcagaaagctgtccatttcctttagattttcgaattttgcggagcacaggttttcaaagtatgacctgaagattctctggatttcctcagtgtctgttgttatatcccccttttcatttctgattttgttaattagcatactctctctctgccttttggttagtttggctataggtttgtctatcttattaatcttctcaaagaaccaactccttgtttcattgattctttgtgctgttttcctagtttctactttgttcatttcggctctcaggttgattatttcctggcatctactcctccttggtgtggttgtttctttttgctctaaagctttcagttgttctgtcaattctctaatgtgattttcctccagtttcttcatgtgggcgcttagtgctatgaactttcctcttagcactgctttcagagtgtcccatatgtttgggtatgttatgtctacattctcattaaattctgggaagtctttcatttcatttttatttcttcctcaaccccggaatggtacaattgggtgttattcattttccatgagtatgtaggttttctgcaatttgtattgctgttgaattctagctttaatgcatggtgatctgacaagatacagggggttatttcaattcttttgtaactgtggaggtttgctttgctgccaactatgtggtcaattttagagaaggttccatgtgtccctgagaagaaggtatattcttttgtgtttggatggaatgctctatagatatctgttaacccagttgggtcataacttctgtcagatcctctgtttctttgttaagtttttgtctggtggtcctgtctagtggtgtaaggggagtgttgaagtctcctactataagtgtgtatggttttatgtgtggtttgagctttagtaatgttttctttacaaatgtgggtgccttcgtatttggggcatagatgctcaggattgagacttcatcttgatggacttttcctgtgatgagtatgaaatttccttcttcatctcttttaattgattttagtttaaagtctaacttgttagatattaggattgctacaccagcttgtttcttgggcccatttgattggaaaatcttttcccatccttttactctgaggtatcgcctgtctttgaagttgaggtgtgtttcttgtaaacagcagaaggatggattctgtcttcgcatccattctgttagcctaagtctttttatgggtaggttaagaccattgacatttagggatattaatgtctattgttcattggttcttttggatttattggtggtggtgtcattgtgtgtggattttgccctcctgtttctttttgtgtttggtaaaattagattatctattgcctgtagttttgtgagtgtagttatcttccagttttccttccagaaccttctgtagtgctggatttttgggtatgtattgtttaaatctgtttttgtcatggaatatcttgttttctccatccatagtgattgaaagttttgctaggttcagtagtctgggttgacatccatgctcccttagtgcttgtagggtatctatccaagacctctggctttagagttcccaatgagaagtcgggtgttattctcattggtttgcctttacatgtttcttggcctttttcctttgctgctcttaatattttctctttattctgtagatttggtgttttgattattatgtgtcggggggggggaattctttttgtggtccagtctgtttgatgtcctgtaagcttcttgtactttcataggcatatccttccataggtcggggaagttttcttctatgattttgttgaatatgttttctgtacctttgagcagggtttcttcaccttcttctatacctattattcttaggtttggtcttttcacagtgtcccatatttcctgtatattttgtgttagggttttgttggacttaatgttttctttggatgatgaatgcatatcctgtagtgagtcttcagtagctgagattctctcttccatctcttgtattctattggttatactcatatctttagttcctgatcatttatccagcttttccatttccagcattgcctctttctgtgttttcttcattgtgtctatttcagcttttatgctttgaactgtttcaagaacttccttcacttgtttggatgttttttcttgggcttctttagattctttaagagatttgtttatttcttgaattttttggtttgtcttttcctccattttgtgcaattttttgtttgctttttcttctatttctttaagggattttcttgtttcctctttaaaggtctctatcatcttgctgagataatttttgaggtccatctcatcttcatgctctgtgttgggcttttcagatcttgctggagtggagtccctagattctggtggtgtcatattggtctttctgttgttgagtgaaatcttattctgttcttcccacatcttcttctagtgggtgcaggtggggtctctctatctcctcttgtgacccagtggtgtgtgtgggctaggaattcaatgtccgcaactctggatggtcttgcctcttttgatagtctcctcactcgttgtggatcggtcggtggaaagggatggaagagtggggtgtttccagattcagggagctcctccttgtctgtgtgtgtctaccccaagcaggtgcaggcctcgttcgtgggttggtcagtggaaagggcactaatccattttcatttgtgctctattcacaatgttcaggttatataaatagcctagatgcccatgaactgatgaataatgcaaatgtggtattcatatacaatagaatattatttagctgctcagaaaaacaaaattatgaaaatttaaggtaatggaaagatctagaaacaatcaatccttgtacagaaagacaaatgctgcatgctttctcttatatgtggacgctagctctgaaactgggttgttgtatttaaatttaagtacccatggaaatcagtaaaatggtagggggaatcggttggggcatctccagggggagggatgaaacacaagtgatatgaaggagggttcgggataatggaacagggatgattgagttacatggataaaagaatggcaggatagagaaagtcatatggaaaactagtttggtatagtcttcctaaaatacatatgcatatatatgtacataaacaaacacatacaaaaagagtttaaataaacttacccaataacagggaaacaatattccttctagacaccatagatcatcaactaaaaagcccagttccacgagtgggttactcattttggagttgttgactgaggggcaccaaataacactaaacattaaaggctatttccattgttcttggttgctatccaaaacttgatggtgagaccctagtgctgaagacagaacatacttgagtcatggaacatggagaaatcaagtaggtattaacctggaagctttatgtctatggtatagctttcatggtgccagaagaggatatgtacaataacagaggagaaaaataatcatcagtcttatccgtgtagaaaccctgagagctacaataacaactaaaccggcagaataaaccaattattgcaatagtggcacaaacatgaccagagtaaccaactatttcctgactggacttaagtcctggtttataagatgaaaaccataccagacaccattttaacgccaagaacctgcggttagataaatacaggccctaggagagaacttactatcattattccgctaaatagacatgacatcaaactgacttctaatggtttatcattatacccatttattagtgcatctttcaacactcaacagagaatcttcttttttcagtagatggtaatgtttgtaaaataaataaacagaattgaagcaacatgacaaaataaacatcatgaccaaattggcttcacaccagggatatatatgtatatttctttagatattgaaagggcctttgacaaagtcttacaacccttcatgataataacttcaaattaagtatagaatgaatacactttaacataataaagactgtatatggcaaacctatagtcaacattatattaaatgggagaaaacaaattattttcgctaaaatcaacaatgaggtaaaagtgtttaatttgtgtacttctattcaaaatagtgcttgaagttacagctaaaacaacaaaacaaaaggagagattaataggaaccaaaataggaaaggaagaaatcaaaatatccttacatttagacaaaataatcctattcataaaaaaaatcctaaagatggtaccaaaaaacttagaggagtgctgaacacatttatcaataatcatgcaatagaatcaccatacaaagcataataatgagtacttttacaaaatagcagtaatgaatattatgataaaaacgtaggaaaacaattgcccaaatagcttcaaaaataaaacgaagctaagcccaaccagagaagtgaaatacttcttcaatgaagattttgcactgaagaaagaaattgaagacaacactgaaatatggaatgatctcccatgctcatagctaagcaaagtaacactctaaaattgtctctagccgggcgttggtggcgcacacctttaatcccagcacttgggaggcagaggcaggtggatctctgtgagttcgagaccagcctggtctacgagagctagttccaggacagcctccaaagccacagagaaaccctgtcttgaaaaaacaaaacaaaaaaacaaaacaaaacaaaaaacaacaacaacaacaacaaaaaatattgtctgttacccaaagtgatctacaggttcaatgctccaatgacattatttacagaaatggaacatttctaaaattaaatggaaatacaaaacacaatagtgaatgcaattctgagggaaaaataaacaatgctggagttatcaccacacccaatttcaagttattctatagagccatactaacaaaagcaacacagcactgacaccagaataggcatacagttaaatgggatataggatcccatttcagccagttgattttttgacaaagatgacaaaaactaacattggagaaaaaaagggcctcttcaatgaatgttgttgagaaaacttggtatgactatgtagaggaataaagttagattccaccctctaccctgtgcaaatatcaattcaaaaaggatggaagaccttcatagaagatacgaaacttagacttgcagaggaaaatgcagggacaagattttaagctacaagtatatacatatactctttgaaaagaattccaagaattgacaattggattgaatgaaatttacaaagcttgtgcacagcagaagagaccattgatgaagttaagaacctgcagaatggaagaaaaagctttgctagataaatgtgtgtaaatgattagcttctgaatatgtggaaaactcaaaatacttaacaccaaggaaccaaacaacccaaccaataaaggcactaataaaatgaacaggtaattctcaaaagacaagtcaaatgactcaaaaccatataaaataaatctgcattaaagaaattcaatcatagaaacacatattaaaactaaattgagattttgtgtctcatgagtcacaatggctaccgttaaaacaaatcaaaacaaaaataagtaacagtaagttacttatggaggtaaagttttctttatacattgctggtactaatgcaaaaatcatctaggcaatgtggaaataagtatggaggctactcagtaaaataaaaagtactgtatgacctgatacaatataccactccttgatatatatatatatatatatattatatatatatgactttaatgcaccccacagatacttatattttgacattgattgcagcagtatttacagttgccagattatacaatcagcctgggtgtctttaagcaggtgatggctgaaaaatggacaatggattatgtacaaatggagttttttcagctataaagaataatgaaattatgttgtctgaaagaaactagatgcagagttcatattaagtaaaataagacagaactagaaaggcaaatatcaccaaatttccctcacttgtggatcctagattttatatatgatatttttcttttttcaaacagtttccattaaagtagaaactaactgtctggaggaacaaaggatactagcagcgggggaagaggaataaaaaggactttatgcatgtgagaaccttaaaagtgaattatatagcctgctgttggtggcgcatgcctttaatctcagcactaggaaggcagaagaaggcagatctctgtgagtttgaggccagcctggtctacagagcgagtgccaggccaggctccaaagccacacagagaaatcctgtcttgaaaaaccaaaaaaaaaaaaaaaaaaaaaaaagaaaaaaaaagaagataacaatgaacacatgctgataaaacaatctcatttcaaataaaagataaggagaaatgtgtaaagttgataaaatccagagacaagaaaatgagggcaaccaaataagtatcttagcaataacaggccagattcactgctggacacagagtttctcctagtgggaataaagctgagagtcccatcaaattctgttggcatgcgatctggcaaagtccaggcttatattctaaataggtaagaagcctgggatctgacttaggaggagggattatttgcatctcccaattcatttccaagatacagtagctgagggctgtcttgtgaagggacctgccgtgtggatcaagactattctggagggccagaaaccccagaataaccccatcttttggaatccttcaccatttttactgcacagcttcaagtgagatgccactctgtaagagagactttgcttacttgtcttggtggagatactttgacacaaacctagagacagggttacatggtatacagcagagttgcatatggagcagagaagataccatctccatgaaatttgggagcttgctcactgtggctgagggcgtggccagacacatttagttttgcttgattgacagggctaagggaaccatgactgaggtcactgggtcatggggctcctattgtcctttttcaagcataagactttgtggctatagtaattactctgcctctgagataattctgtgaaggtcttgaacaaacctcttggatatatttttgccccacttctaggatgttctgtttaagaagttctagataactctacttggtgctgcgtatacccctttagcttggttttactttttttgcaagtagcctggttgagaacaattaaataacattctgttgtgatgtctttttctcaatacccagtgagacaacaactgaaagggagatgagggatgctcagacatcctcctgcctccgtcatgcataacacaacacacaaagaatgactttgcttggcttagacagcataggcacctcggttgagtagaattatcattgattttatgtttttctgctatttttattgctctgattcttttctattgttactttttattgttgctgtgtgtggttctagggatagagctcaggacctcatactcttgaatattactcatcgagctaaacccccaccattgccttagcaaaaccaactcaacactgagatagacctttaagctttgtcactaaggaaaagaaaagctccagctactggtctaacatgagtgctaacagcagggcttcagggaatctgaagtcttgcctctggacaggcagacagacagacagaaaggacacacacacacacacacacacacacacacacacacacacacacacacacacactaacagcagaggaaaatacacattttttttcctgacaccacactttgttttaacacagactactgacaagactgagagtgaagtcaggggatagggtagggtagggctgtgattctggctgccacccgtccctgtgaagcttctggacctggaccattgtctaaccagaaagcaaatgtttcaggcccatgccatgactgaaacagtcagtatcaggaacctccttaagtaacatagctaatcttagtcatgcccatggaaatcctcattactgggtagcagccaacattctcattttatgtgtaagtacagaaggtggccccaatagttctgctgtctgtgccatgctgactcatattgctagtgtcctttctgtgagaactgcagggagggtgggactctctaacaatggaactgtactcacaatgcccaaagacatccatcacaaccaataaagcatcaaggattaataaccctgtggttctagaaatacttaacattgtacaacaaactgatatccaaggcagagtatcaggagaaacctcttcctacaaaacagtagagatacccactataacagacataccaaaatcaacacaggagtttgagatatggaaaaataaacttggacacttcctaaagtccataggttttaaaaatagataccatagtgttggagtacatgaagttctcaaaaaggaattaagtgatgatttaaaaaaaaatcaatgaaaatcaagggactacaagtaagcaactaaataaaacaaggaagtcaacaaactatatgcattataaattcagtatgggaatagagtttgggggaaaagaaccaatcaaaaatataggaaataagaacaccatataaaaaaaaagtcggttgaactgggtatagtggttaatgcctgtgctcccagcacttgggttgctgaagcaggaagactacaagtatgaaaccaagtgagaccccatcctaatacaaaacaaaacaaaacaaaaatcagttaaacacccgaatagcagaccacatcaagcagaacaaatgttagggtatgaaaacaggcttcttaaacaatgatattcagacagaaatacagagaacaaacaggagtgtatgtagaaatcactcaacatctttgagatgctatttaaagaacaaaaatttgtattgccagcagaaataagatctgagagcacataaagactattgaatgaataataaaagacagcagaaaataccccaaatagagaaggtaagaattggatattcatgtgtagaaggaatttagaaccccaaattgacatggccagaaatgaaccccagaatgaaatacaataaaaagccaaaagtacataataaagaaagaatttaaaactctatgagggataagtgccaatgcaaatttaaaaacaactaccagaggttgctcagtagaaaacataggggcaagcagggcatgagaaagttaagtccttgagaaagtaactatcagccaacattactgtgcccagtgaagttatctttaagaactgaagaagcaaggcattctaagaaaagcatgcactaggggaatttgtaactactggaccagcaatcaagggagacataaatcaatagaaagaagaaatataacaactgtcataaaatcaaggaaaaggaaaaacactattagaagggagattactcaaatgaaatacagaaaccattcaaatgctctcaatacagttaaccaccaagctgccaagatgaatgtgaggagaagaaaggaaaaagaaaagaacagtcaaaacaattagaagaaactcaacaaaatgacaaaaaaatcatattgttccatgattattcccaacataatctcccaagtaaaaatagagactagctaaatgtgttaaaaagatgtacaaacaggtggggctggagatgtagctcagttggtagaacatttgcctaccatgcacaaagctctgggtttgaagcccagcactacataacccagatacagtgattagtacctgtaatcctagcactcagaagatgggggcaggataatagcctaacataataatataataataatattcaacgtcatagtaatgggggaaggtgggagactgaaagcatttcctctaaggaataagacaaggacatcttgcccttcctgtcctcacataaaagatttgggcacagcagttaggatagagaaagacatacaagatatacaaatagaaaacacagaagtcagagggtccctgcttgcagatactatcgtcctattccttttcaagggaaggttaatgcagcaaaacttctaacatgtaattagcacatgggcaagctaatctgagtgctttctagggaacttaacagagacctttctgaatacacaggccacatagtggagaccccagggagggcatgccagtgtagtatggcaaaaatcttcacaaagtggaggtaactctaggcatgtacttaatgagatacaaaataagtatcaaaacaacctttactgaaaacacatgcatagtaaatcatatcccaacgttattgaaaagaatagaagaaatcccagaaatataaagctcaatgtctgacatctaataaaatattattaaacacagagtgaagcaggggatcataactgtgataaacagaaatctatggaacagagtaataaatgataatgatacttgcataagcagaaagtgcattaaaataaatgttaaacaattgctattatattcagggatttaaacaaaatgtgaagcagtagagagctaagaaagatattaaaacatacctaaaaggatgtctagatgtgagaaactcagtatttaaagtaaaagagcaacagtaaggattctagctatttgtatgtgacaaaagctaactagcagtgaacatacgacattagcagagtgccccaacatgaaacccacaggaaaattcccaggaagaaccttgttcagtgagtattgaggcaatattaaatggtctcaagcacacaattagagatttagaaaaaacgaggcttcaggattcactgaagaaatagaaactttaaattctatgttggtggacattaaatctacagatccaagaagccgaagcccatccaagggtaggctgtgcactggcaccacatcaagctccccagagtcaagtcactgtgaaccactgagcaacagaaacgtcacagcagaggagaaaagcagagttcaaggaaaccaaaaagacaggctgcagactgctagcccttattccaggagatgaacagttttaaaagattgaaagttaaaaacaaaatttagacatggggacgcaaatctgaattctcagaaagtaaaagtcttctagaagaaagcaaaaggactttttcagataaatacacatggagtgaaccagtcgttagtaatctacaaccaaatgctcaaggaaccttattagatcaaagggtaccaggtaaattaagatggaggtatatcaagttttcaagcaattacatatcaacatataatatactgtaatgaatgtcttggtacatgtaatatagtattgcaaaaattataagattgtaatactttaaattatggtatatacttaatattaactatacaattaacagaatcaaatattacatttattatataattgatatatcttaatagttggtagcttaatattattgacaacagattgtaacaaagttaataatttataatgttacacatttattttgccactgttttgtagttcaggaatataggcatcttattgctggaggccccagtcctgggtttccaggctacaatcaaggctggtttcataatgggaaacttcagtacaaaatgtgggcttccataatcaagcagagttgaggcagaatttattatcctgtctctggagatgggttgaaagttctggtttttgctggacattgcctgaagaccactctcagatctgagaagccattcactgtaccttgcaatgtgggcttccttgttacttctgtttgtctcaagccaacaaaaattgtttactttagactgcttaaacagaatgccttgtcttataatgtgatgaggtaatggcattccatcacctttgtcaaatagaataacatagccaggggttatggcatctatcaactttgcaaacactgttgatgctacttacaatgaatgctacttgcaaatgaataaacaactactgtaaatagtttctgattattcatgctgtagaattacttttgttctctttaaatttaaaaagtagaatcagtaacctccaatgtgagcataattacgattaaatggatattccaaacatgagtctctctctaagaacacacaattctccctctcacaaaaaaggaggggagaatacaagttgataactgttgagatatcaccatagggtcagtctgccttgttaatactgaaaggcattcacctgcttgcagaaagagaatgcctttaattttgcaaatattcttccaacattctaattaggtcttggtaaacttcccagggagcatcctgtccaagataaaaatccaagtgattgtagtgtgggatctccttgtagtagataaggttggtgactttagggagcagattttcggtgtccttggcatctgccacaacatcctgtccaccactccacattgccgttgggacctgcatcttagtgatgttgtacacaggcggtgtaagctaaatgaagcgaggaagagagagagctctattatggaaataaataaaaccatcggatattgtgctaacttttcaatcctaatctgtttaacttaatgatatataaacctgaaaatattctgccagtcagttttccactgctgtgaaaaaatgtattagaataacaactaaaaaataagaaaggtgtgctctagagtttcagagattgtagtacatcttgtttgtttttaggcctgctgtgagtacagtgtatcatgacagaagcatacaggtgaagaaagtcccaccatcatagaaaaaaaatcaaagcatgttcatgcaataattgtgttaggaaaacaaggaacaaccatcacactcccaacttgcactttggggcagatagggaaaggtacttgaggaagagcatttctctaaaaagaaagggtttctcttttccatagagattggcccaagagtgtccttttcagtaattactagaaaggataaacatctgtttcatatgcagaaatctgggctcagcagcttttttgacacttgtgcatcagtaggtttttcagagaacatttatactaacatatgaaaacaaacacttgaaatatgtttaaagggatttatttgtacacagaaatagtgtggtatagggctaaatactgagcaagctttcccttacacactactctttttaatgatctaggtcacacattggtttaaatgaccaagtacctcagttggtccttctgtagccagaagacccactgcagtaactcagtagcatctgtacacaaggctaaaactaggccagaagactttctggcaccttgctctttagctgtggagaaaatatatcttttcctttggctgcgaaatggcaagagctacgtgatgtaaagtcaccatgtgagtattattttggaaaaagccaaagaatggaaataggagtccctgagaaaaagtgaaagtgagctgggaagacagaggtgggagcagacctgatgatgctgcagggagctagtctcatttcttttcttctttctttttaacctaaaagggacttagattgtggtacttgcaaatgagtaattgaccaaatagtttctgattatccatgctgtagaatgaaatttgttctacttaaattcaaaagttgaatcactaacctccaatgtgaacataacttaggataaatgatgttccaagagtgggtctctctctaagtctacaaaatccctctctcccctctctgtctccctcgtgtcatttacaggaacataccctaagaccacatggacacacattaagaattcaggcatcttcaagccagaaaaagaatcctcacaacaatctagccctgatggcacctttaccatggccataatacttccagaacagaggtaacagggacaaaggtgaagacccaaggacccatgaaagcttctttattattagctccatggaattctgcttggggaagatcatgacaagatggatgtgcatctcaagttctcttcaaaatgtggtactcaggcagagctcgctggtatagtcaggttgagggctactttcatttcagttgatgggctggtgcctggaagtctgaactcttaaatattaaaagtgtattacccctctcacctttagtggggtgtgtgtcttagaatatggtaaaagaaaattagttctcagaaagcaacacagaatgtagagaaggaagtgagtgtagattgtcagtgtctaacgtgcaaggggtagggggttccagagggcctggcacagtatccccaatgtacagtcaagctaggaagagcgggagctggattttcctgacggtggtttccttaggagcagggtacaaagcacaaatacttagctgcaaagatagagcacaatgaagattgaaaacaaacaaacaaaataaaacaacaacaaaacaacaaggaaatgtgaaggcatcaacagacacagacaagctttcagaaacaaagccagacccacagtcccttcatctgggatgcctttactccagtgaaattattactctgctaagaaagcaagcattgtgaagacagcaaatcataaatgaatattaaaattcagctttaaatggtatctggtaagttatgccaggacttttaagtttgtttttaacctgacactgaggtttatatgtattcatttagaaattatacttcctcagcaatgaaggatcactactgatttatgtcagtaattgcacccacataatttatggtgtcattgagtgtagttgtaactaaatgctactgccttttaaatatgcatatttcattttttttcaagacagggtttctctgtgaaacagttcaggctatcctggaagtcactctgtagaccagactggcctcaagtatagttcatcttctgtttgagtttccaccaaaggtttcaagcaaagtatccatatctgaacctctgtcaccatatacctatgatttttatttcatttgtaaatgcaaagatgaagctctgatcccacttccatctaagtctcctagctcataaggtgcaatcagtatctaaaatgctcttcccagagaaccacaaacttgttggaagaagaaaggtggtcatcaaaacagaaacatggcaatttgacatgatgtgtttggtacctgtatttgcacccaagcccatgcacattcaagaatagcagtttaggaagacaaccagatttttcaaaacattgaaaatataagttttctctatgctatttattctttgtaatttaaaaaagctgatgacaatgttttatgttttatctcagtctgccaccaggaagtcaaacaatgattggctctcccaacataattggaagaagttccagtaaccaacagcatatactgtttttagtgtaactattcattttcatagatgatgtaaagaggtatcttaatattccattattcattagatagtatcagttctctttaaagatggcaacttctgattgatgtgtcttaaatgactcatagattggattttttaaagtaataaaagacatccttagggactattaaagcaatgctagtcttattaggtgaagacatgcattagaaataaggtcatattttctaattctatctttaaaacagtgttaatgaaatattgagagctcttgtttgtttgtttttacagtgaaggaatgagtagtgaaaaaatagagaaataaatttagatacagaaatccttgggtcatattctagctatttctccactaacttccttgagcttccaggaaaatgagggcatttttagctcaagtgaccattgtgaggactagaaacaacaactcagcacacagtaaaacccaggaagtatcatgtgctaacagcaataagcaatgcccatcatagcaagtgcggagtagtaagcacttaaatacttgagtggaagccgttctcactggctcattgcagtatgccactggctgtgatgagcatcagtgttatctacctgattgaaatgcatcatgttctggttaggactgccccagtcaaaagcttggagtttaccagaattgacagcctaagataaaaaaaaaataaacaaaaccacattaaaatgacacaagtaaacaatgtacatataaaattaatgagcaagaaatacacaaagattggtaatatgtatactcattagaacattgatcaataatgaaaacagatactcctttgcataactgatacatcatttataacccataccatatcttttgaatgaaaatctgcaggtaacaatgctttcaactgttacagtatgcaatggatttcaagaatttatatctccatatgtttatagaagctttgaccacacatttctttttctcttttcttttttctttttggtttttcgagacagggtttctctgtggctttggaggctgtcctagaactacctcttgtagagcaggctggtctcgaactcagagatctgcctgcctcggcctcccgagtgctgggattaaaggcctgcaccaccaccacctggtttgactacacatttctaacactaaaaattactatggctgttattaaacaactaggttctttactatccccccaacaagtgctcttatgctattatgaattcattcctcattattaaacatttttctcatctttaggaaaaaaaaatcagcaaatgtcgactgcttgttacttctgtgcaggaccaagtcatgtgtcatgccatgctgtaagagctatgggctgagtgctggaaacaatggcgatgactagctttacacattggtatttaggcttcaaacatgtaagtattccgaaatttacagtttccttgattctgttgtttgccacctgtcaccttgctgaattaagaaggcagatactccagatttatatcaagtactaaattatcctcagaacacagtgagactttctcttcccttaacttataacttatattgttattcactcatagttttaatccttttagtttaaattgtttgcttctacaacattatataaaatgtatcatatattatatacattgtattatttatagttatatatttaaatatataattatctattatataatggtatgaaatacataaaatgttatggaaattaaaatatatgtgtgtgtgtgatattaaaatcccacacagtttaatcagtgagaggcaacagagcttattatttagaatctggagtctagtgtctaataagcctgttttatatccaggtttgattcaatctgctattcagggcaagatatttgtgaggtatgaatgatgacagtattctttcaactggcctgtgagatttagatgtgtataaataaatcagtagtgggtctctcatgcttgagcagactttattcatatctacccagaagtgaaacttccaacctttccagaaacatcagggtttttctaactatctgtaatggtttctcattttcagctttaaagtaggttaagagaaaatagtatacatgttaaatgcaaattactgtctcccactacctcattttctctcataggtagatgggattatgcttcttttgttcaattcttataaaaggatggggctgaagtgactggtcagcaatacagacaaagttatacaaagtaccaatgagcatacatgcacatcttgactcagaaacttgtacaacttaattgcatttgatttatctctgagcttactggatattgagtaatcttattagacaaaattgtaattgtgggcaaacccacagactgtttgtctattttaatacctccttaacactgcctttgtttggaataaagtgttctttctgctccctgaaatgccccatgggctaactggaagatgaacaggtctttctggaatagattgtattattttacatcaagttgtaccaaagctaatgatttcccagaagaggaaacacaagccttcccaagacaagtcgagggaggaatctaaggatgagaactgattcagaatatgtaggaagcaggttcccagctcaggcactgaagacaatgagaatggatagatggaacaaaggtaatcaaaagaggaattggtgctgatcctagaacatcaccacgataggcaggtacctgctggccctacatggagcattctgggagtaccccctcaaggattttccagaggtttgggtgtgtcagtcaggaagagagaacatatacctgggcccagtgcagcatgttctgaacggatgttcctgcttgactgtgtgccatataaacgtccaagcgactctgtaaagagatcatttctcatctggaggctactcataacacatatgcagacatttgaaaaacacttcaactctctatgtataaaaacaattattatctttagggaaatatattttatatctttacggatatattaacaagagaaggtcatctttaagagcactcccctcccacatctttgttctctgtcctggataatggttcccttcagcccacagaggacaccagactggttgaatgcagaaggctatatagcctttctttcagaactcatctcacacattcaaggggttaaaaattttagtgactctctcctctggtttgtatataaaattgacattaagataaaacttccacggactggacagatagcttagtggttaagagcaatgactggttttgtagaggattctcagcacccacatggcagtttgcaactggtagtaatgccagttccagggggtctggtgccctcttttggcttctgcaagcacagcctgcatatggtatacaaacatccacataaagtgaaaataagtaaatctgaaaaaataaatttaagaaaaatcttagctcaaaaaccattgggaatagatctacatgtttccacaaaagtggcagcaggcctctggttgtgcgtcactaaagtatctgttcttccagacgtcataatatcccataatccagtccttaactgccagtctaaaacagatttgtccaaagagagcctctactgtcaggggtattgctttattatctctcaaacatttgggccaatttgcttagcactgcttatgtgacgtattttcatctacatgacattattgcctctccatgatgaattagcccaggagaactgagttgagaatgtggacaggcagcgtggcccaggctttatgctttgcataaaactagtctcttatgaaagcctcgagcctggtcatcagccctgtaattccgaaaatccaggagactgaggcagaagtaacatgaattcaaggtgcatctgggctacatagtgagtgcaagcccagcctggtgacttagtgagaacctgatatttaaaaaacacaaggggaccaggctcttggcagaagcctgtgagatatatggggtgatcttcagctgtgtgctacctctgtttcaaacattgtccatgtcaatctaggaagagaagagtaacttccgatctttcccctccttgtccctcaagttataatttgaaaggaaaggagcccatttatactaaaactgaggaaaagaaccacagtaagcacccctctccacactcttgaatgcagagtttgtagctgtcactgaaaaagccaaatccctctttttcaactaggggtgactcacaagataaggattttctgatggcccacagatatggaaacgtaaaagcaaacacaaaatgcagattctagaactactatctgagattccacgggtctgaaatagtcataattctaatggaaataaagaaaatttttaattgtagaattttagcccaggaaagaactagaagcactgtcagcacagatattttcttaaagtctttatttttaatttttaaataaaggatagtcagatttcaaccctttttggagccaggaggttattaattacacccaaaaaaggtaaagaggaggctatctactgtggtttccataacatccaatgtcacctctcactccttatgcaacaaaattattggcttccaggaagtgattacttatacctaccatgtttaagttttggcgatcaaatccacttagagaaaacatgaagttgctgcatataggatgaaatatcttccgactgcacactttggtggcaacgaagtgttcaagcaatgtgtgagaggagaacattttgtcaccaaacaatacctgcaagatgggtggttaagtatcattaaatgtcatatacagggatgtcaacagtgacgaatgcttgttcattcaggcaagacagggcaggtgagagaactgatcctgggtgaaaccatgaagctagtgaaattctgtctctgtactactcctgattccaccgatgcctttcatgagaacttttcactgggatgttttgggcatattcccttagagaacagcttacacaggaattagtaaaactttgaaaagagcatttctacatgattctggattctctttctgataagaatttagtttctatttgtctaaatttttgtaactgaacaatgggaaaattggtatctcctaagcagagtcaccgtgaaggctataggtcacatttgaagagtgtctagtgaagttctcaccaacagtttctgaacaataactattatcctaagaggtgactaaaatagctaatgaacctttcctgccatattcctttaatgctttcccagaaacaaaagctgcacccaaaacagggcatccctactaatgagattgtaggcaaggctgcaagtatgttgaatgccctttttgattgtagaaatctatcacattactgcacatcaaagtattgaatccttgtgtttattagtcagatctagcatttatttctgtcacagtgaagttcatattattaggttaagttgcaggggaagaaaagggatcatttttagttcttaaacatttcagaaacaaacatctactgataaaactggcacagatttcttctgaaatcctttatttactgatgattgtaacaaacaatgacaaaacaaaaataatgggcatttatttttattgtagcaatgcactataagttcttatattttctttggcaaactggagccagtaaattcctacatggttcaacttcaattatgaatttaaaaactttttgtattacaatattgaaaggaacccatatttaataaaatgcttactagtctatgaaactttgttagaatatttaagacaccatgacctaattaatagacctttcatatcaaagagaaagaagagagactggaggagaagaggaagaagagaatgaaagggaaggaagaatgagattcaattaaactagttcaagtttctcaattctttaggtcagaaggccattgtagaaattaccttattcattctttcttgttctttattttgtcacaattactatacaatcctagtgattactcaattaccaaactgtaatactttgaaactgtccccatcataatttaagaattgtggcaacatatattcatagagtgaatttatgtttaaaaggaatattgacacctattcagtgttctaagtgtaaaaacttacatttccacaaaataagtagcttaactaaaaataaatatttaatctgagtaactgaatgtttccattttctgtttatcaataccttttccatccatgtatggggaaatgtacatgacatgaagcaaccattaaattcaagtagtcaggttcaaaagtacatgaaggaagaggtcatcttattacacgggcctttgttctctgttgtgatagtgaggtctcccaaattcaggaagggataccatggtaatcttgtattttacttcacctctctggccattactatgcacttacttcaagacaaataattacccctttacccagacctgcaggagagtacagcataatattgcaagaagtccagctcctatttacaggtagacacactactgtgcagatgtaattccagcttgatcctggagagggcatgtttgtcacatgataattggcactcagggtcctctaaaaatcagcactttttgtgagaattgagccatttttgtgttttggaaaaaatggcaccatgccatattgtggctgtaggcaaaatggatataacacttatacatatcatctcaatgactactacagcttgagaaattctacccactaatataaatgtgaacacatcacttgccaagcagaacattggttggcatacttctctaaggaatggtccactcagctggacatccttatgtatgtatctgtgagtgtccaaacatgactttttttctgactgacattgaaaacattatgaaacaagatttggtaaagtatgccctgggaggcaggggtgggaagattgccacagtcagatgcctgttttgtacatcaagttccaagcttggcaggcccaaacatagcaccactaccatccaaacagtagagaaatcattacatataagggaaaccatcatcttcttttcgttgcccgataagaataagattgaggttctggctttagcacccattagcaggattatttgagaaaagttgctcagtttatctaagtctcaagattttattttaagaaatgaagagaactttaaccaatgagcagaacagaaaaagtaaaaaagaaaaaaaaggttcattgtaaactgaagatttaaaagaaagtagggagacaaaaatacaaagaaataaatgcccagaggctgaatgaaatgtgaagggagcagcagtaaataaatgtcaagtgttgtacatttaaatctaaacttagcttgatgaatatgctaatgatgttaagcaatatttgttgagaatgttattctaacaaaaatagcctagatacatggggaagggcctagatcctgccccaaatgatgtgacagactttgatgattcctccatggaaggcctcatcctccttagggagtggatggggggtcattgggggacatgggaggatggaagggagaaggaactggattgatatgtaaaataagattgtttctaatttaagtaaaaatatataaaaaagaatatagtgtatatgcatttctactctttttttttttttttttttttttgagacagggtttttctgtggctttggagactgtcctggaactagcacttgtagaccaggttggtctcgaactcacagagatccgactgcctctgcctcctgagtgcagcatcaaaggcatgcaccaccaccatatgttaccataaatctttccgccataagcctccaagccccattgccacgtgtgcgctttatgccagccgcctgcctgagttagggccccgattaatgcacagagagacttgtattaggtacaatgctgcttggccaatgactaggattctcatctgttagctcagtcttaactatcataaatctatatatgttataagacttatcttatcagacgccgtattggcctccccccttgttggtggatcacatcgtgccgctggagcaggagcagaggggaaaagagagatgcttcctgtttctccttctttacatatgagtctccttgctatgtcacttcctgcctggatcagcacttatctactacaaccgtatgacacatttctcctcttgtttaaggtattgcagctcatttaacaaggtaatgtaaatttctagtccttgaaagttattaataaaactatttagtacaataaagaaatgcaggttagtagttagtcacctataataatcaaactcataatcatgttaggtatgttttcaaagtcaaatggatatgtttagatagattgtcttcaaacacttcaaacatccacagaatatgggatttaaaatgttttgttaacatggggtttttcatgacaataagacatgtctgtttctggcagcaccaatatacttcatagaagatcatggccattgaagaaactccaaatagagtttgctttcaatgtggtaaactagccatttgggaaagaaaatgctgacagtatgctatacaaactgtacaatcaggacacaacagaaaaagaccattgaacttttccaagataaggttagatagtcctacaaaattccagcttcatagaaaagtttaccagacattctgcaggacatatagaaaagtgacagctgaactttgccaaaacaagatgggacagtacttcaaaattcctgcttcacagaaaaggttgtcagatattctaggcagataggccaaagatggatgctcaaagttacagaggaattttggggtgactgtaaggcatccagatgtctctgccatttctatagtttcagaagttgtttgctctgcatttcttgtttagtcaaatattatatcttttggggtctttgatggaattgaagactagatagtcatagtttttcttagttatgataaaaaggaaattagatacaaaactttaggctcatcaagataagataaataatggagaattttctctaaattttccaaatactaatggactgaatatcataaattcttttagataattgttcttattttttcaagacagagtttctctgtgtagctttagagcttgtcctggcaatcactcaattgcctcaaacacacatagatctctctgcctctgcctcctgagttctgggattaaaggtgtgtgccaccaccacctggctttgataattgttcttattgtatgtagttttactatgttagagttcaaacctttaaatgtatacaatagaaaaaagatagcatcttcaataaatggtgctggcacaactggattcagacatggagaaaattgcagatagatccatatctgtcaccatgcacaaaacttaagtgcaaatggatcaaagatctcaacataaatccagccaaattgaatcttcatgtagacaaagtgggagatacccttgaacgaattggcacaggaaactgcttcctgaacattacaccagtagaacagacattgagatctgcaattaataaatgggacctcctgaaactgagacacttctgtaaggcaaaggacagtcagtaagacaaaacgacagcccacagaatgggaaaagatcttcaccaaccccacatctgacagaggactgatttctaaaatatacaaggaactcaagaagctagccaccagaacaccaaacaatgaaattaaaaagtggggtgcagaactaaatagagaattctcaacagaggaatctgaaatggctgaaagacacttaagaaagtgctcaaaatcctcggctatcagagaaatgcaactcaaaacaactctgagataccatctgaaactggccagaatgactaaaatcaaaaacaccaatgacaatctatgctggtaggagtgcaaacttgtaagaccactttggaaatcagtatggcagtggctcagaaaattgggaatcactctacctcaagatccagcaattcctctcttggcatacacccaaataatgcacgtccatacaacaagtacatatgttcaaccatgttcatagcagcattgtttgtaatagccagaacctggaaacaacctagatacccctcaactgaagaatggatagagaaaatgtggtacatttatacaatggagtactactcagcagaaaaaaagcaacagaatcttgaaattcgcaggcaaatggatggaactagaagaaaccatcctgagtgaggtaacccagacacaaaaagacaaacatggtatgtactcactcatatatgaattttagacgtaaagcaaaggattaccagcctacattcctcttcaccaaagaaaccaggaaacaaggactctaggagaaaaatgcatggaccccagagcatgggaaggggcaagatctcattagctaattgggaacttgagggtaagggtcagggagctgccagaatgagaggagcagaagaggaggggaaagggggaaatggaggagcagaaacgttgagttgggggaagaatagagatcaggatgagagataccatatcagaaggagccattataggtccgaggaaagatctggcaatagggagatttccagagatctacatggatgacatgaactgacaatctaggcaatggtggagaggatagcctaaattcccttcccctataataagactgatgactactttttatgccatcctagagctctcatccagtggctgatggaagcagagacaaacatccacatatatacactgaactgaactctggaacttacttgccgagagggaggaatgaagatcaaacgggttggtaccaggctggtgaaacccacagaaacagctggcctgaacaagggggagcacatggaccccagactgctgtctgggaggccagcacaggactgaatcagacccctgaacatggacgtcaatgaggaggccttggcactctaggggggccctggtagtggattagtattttctccctggtgtaagaagggactttgagagcccatcccatgtgaagggatgcactcttggcctggacacatgggggagggcctaggcccaacccaggatgatgtggtggactgtgaggagccccgtcgagggccctatcctgcctggggagtggagggtggatggggtgggaggcaggtggggaattggggggaggaaaaaacaaaaaaaaaaacaaaaaaaatgtttagccatgtgaaaaaagatatctgtgtgtagaactcacatacaccgtgtaggagatggatgcatagatagaaagagagatatgtagctgtatgtaaacaatggagcttggtgaagacagattctcagagaacattttaaagttgaagtaaagagaaacttaccatcaaaaaaatggaggcatgtttgacataatctttttgtatactgtgtaaagatatgttactgtggttgatttaataaaaagttgaatggccaatagttaggcaggatttctaggcacagaggatgctgggaagaagaagggtagagacaccaggatgcagagcaagcagcatgggcattacaaattaaaggtaactgagtcatgtaaaagagtagattcataagatattagttaatttaggttataagagctacttagaaaaggctaggatatttaccaagctttcataattaataataagtctccatgtcatgatttaggagctggctggaggtacactaaagcaattccaagagcaaacactgacaatgaaaagtcactacatgcaacattttccagggcagataatatgttagatgcaaataaaatcctctatgaatttttaaaaattgaaaatcttgggctgaagagttggctcagtggtcatgagtacacactgctgttgcagaggacctgagtttgtttctcaacacccatatcagaaattcaaagatcaaatgtcactaactgcaagcaactagatgccaacatcaacattctagaagaaatgagtgagtccattgatgtggatgtccatccaataccgaataataaatagaaacctgaacaggtcaatagcagctaacaataggaaattgataaagaatagtcaataatggcaaacagtaagtcattgatacagaatagtctctcatcaaaggaaagctcatgactagcggtttcactggtgaatcctaccaagcatttatagaagagggaataccaagctttttaaaattatttaaattgaaaaggaaggaggtcttccaaattcactccatggagccaatattatcttgatatgctaaccagataaggaaataacaaaaccagaaaattaaaggtaaatattaccaatgaacagatggaaatatccttaatacaggttgtagtaaaccaaatacaacacattaaaagataactcatcccaatcaaatggaattcactgaaaagatgtaagggtggttcaaaatatggaaataaaactcactatctaatagaatgaaaagtcaacagaatgaaagacaaaaaccacaccagtagcaataaaaacatattagtgggctggtgagatatcttagcaggtgagagcacttgttcaagcctagtgacttgaatttgatccctggaacatatgtcatattagaagaagagaaccaactccacaaagttatccacaaaccaacccatacacaattcatgtcctacatgcccctccaataataaattacaaaaacacattatcagttcaatagatgcagtaaagattttgataagcttgaacattctgtcaatataaagactatgaacaaattgatatgatagagatgtatctcaagcataatcaaatgcatacataataaccccacagctagcctcatcacaaatggggaaagctgcaagctctctaggatctgaaacaagacaaaattgtcacactcagcacaatatacaaaccaggagcgaaagtcttaactggaacaataaggcagaaaaaatgtcattgtctacctacttactatctatatttattgagtaaggtctttgatacatagatcaacttgaactcaaatttattatatttccaagtttggcctttatctcactgtccctctgcctcagactcctgacttcttgtgtaatagacataacaaccaaacctgaccttgccaacaattttgaaagaagaaattcaacttgtcaccattttatatggtatgatcatacatatagaaaaccccaaatattagccccaaattactaaaactaaaaaatgaatttgacaaagttttaggatctaaaattcagtaggtgggcatcaatagcatttctatatatccatagaaaattattcaaaaaggaaacaaagagagcactcccatttagggtaactataaaaagtaaaatattttggaataaattaaccagcagcaaaaactttctactgtgagaactataatatagatgaacacaatcaaagagagtataacaaccaaacatgccatgtgcatatattaaaaaaccctatcaaaaatagttgaaatgcaattcttaccaaaataaccaacctattttcatagaacaagaaacacatcctaaaatccatatggaacctgaacatctagaacaatattgagcaaaaagaacaaagttggagacatactacctaatttagtgatgtaatacaaagctgcattgacagaaatgtcatggcattaccataaaaacaaatacacacaggccaatggaacagaatgaagagactataaataaggccacatgtgacagccaagtgggctaggaacacacactgggaaggatgcagcctcttcaataagtcatgttgcaaagattggatgtacacgttcagaaaactgaaggcagtcctcttcctgtacagaaaagtaaactaaaaatagataaaatttgcaaaacctgaaactcacagaagaaagtggaggaaaagtgattgtggattttggaattatttaggaaattttaatatataagatgcctccatcattggaaacaaaaacaaaagtagttaaacaggatctcatcaaactaggaagctttggagcagcaaaagaaacaaggcatagccccacacactgaaagggagagagcatttgtaaattacacatcagatggggttggtgttcaaaatgggtaagggactcaatttaggagcataaaaatctgattagaaatgggggatagaattaaataaatgtttctcagaataagaagcataatcagtcttcaagtgtgagaaaaacaagtactcagccattaccagggaaacaaaacaaaaccacgggagttatgtcattccagttagagaaccttttatcaaaagtactgcagataacaggcattttgatgtggggataaagggaactctacagataacaggcatttaagatgcagagaaaggggctgggggcgttggtggcccacgcctttaatcccagcactccggaggcataggcaggcggatctctgtgagttcgaggccagcctggtctccagatcgagtgccaggataggctccaaagctacacagagaaaccctgtctcaaaaaaagatgtggggaaagggaattctccggatataacaagtattgcagatgtggggaaagggaactaaagttggaacaggaataagattcctcagaaatattcagtagggtctcactttagctatgtttgagaggtaacactcagggatatatgttctgtggttagagatgacactagagcagaaggcatcaggactagttcttactgataaaagagtgatgggagatgttattctgtatatgtttctcttattggttgatgagtaaaacactgattggccaggcaggaaataggtgggggataggagacaaggagaattctgggaagtgtaggcagagaggcgtcatcatgtgagcccagaaggagaggacagagtcaggcattctacagtaagataaggccatgtagaaatacatagatttgtagttatgggttaataattaacaccgagctaaccaataagaagctctagtaatcagccaacagattcataattaatatagtatctgtgtgttcatttggggcaaggcagttgtagaactgggcaaacctgtatggaacctttgatcactttttacatcatcaaatgttttaaaaatgccacttgtcagcctagcggtggtggcgcacacctttaatcccagcacttgggaggcagaggcaagtggatgtctgaattcgaggtcagcctggtctgcaaagctacacagagaaaccctgtcctgaaaaacaaaagcaaacaaaaaatgccgtatgccatctcttgatatttgtggaaatagggagatttctagtttcttctcctttaaaactgagtaactcacctaccttgacagcttgcctggaaagggtagttaatgttttcatgggacttctagtgtattttactgtgaccactggagcgagtgcaaaaaataacttaatctttttagccagttctggatttgtcgagaatgctatgaacgctgcagggaaagaagacattagctcacacaaacttccaattatcttttcatcacaaaacaaaacaaaattgtgagtactatttatggggagggattttaaatttctcaagggtagagtgggctctttctggtggagtgattgtatagagagtgttgaagaggaggttcagtcacattctgtggaatgtgtatcttaaactccagagactacattagctcgaacttagtgcaatataaaaccaagggatcatcttgacttctaactcattaactgtgaatgttacctcctttgtatcaatctcagtttcttcaagatagaaacaaggataacagaatcttcagagattgaccgttacttgtatctatgagattacataggtatgtacatatatgtatagtttcatatacattaaaatactatacagaaaatatgcagagaaataaaatcttaaagtgtaacttggtacttttactgtttggaaaaaaattctgaatttaacaatccaagaaacatggatattgtggtcccagatgtatgttttttcaacaagggagaacagagaaaggccagaggtgcctgccgctctgtcatcatgctctctagcttagcccattgcctctccagcaagaaaagccaaactgaccatagcatttaaccagttccataattcagcgcttgtgctttagtgtctttctctagactgtcagagattcaagggaacaatgggcaccatgtttatctttgattcctcagaatataacctggggtctcgttgtttgctgagaacatagattaactcctatcaacctccaaattcagtgtcttgctttattttctttttagaaactacctagaggaaagagtttctcaaagtccccaaaccagagactacagagaaaaacgaacacagaaacaaataaacaaacaaactgacccctcccaccaatacagaagaaaattcctcacatcgtctggttgtgtctgccccaaacacacctatagtggtaccctgtgagtggcccacatagaagagttgtttctgtccacttttctccaagattagatttattgtggctggaagatcatatttagccatctcatccaaactgccaaagaaaaggaatttgaaaagataagtggttgttaaacctacagtatttgcaaggatttcttgtagcatagatattcagctttgactctacatgaggagagtgagaacagtgtgtcttgacaacttttcaggttgttgtctttacatctttactgcaatggcaccactgccgggaaactggaataaaaaaagggtctgatgtgaaagcctactgataagttttccatgaggctgtcacagtctattcatcccagagaagacttaagaaatgtctattgacttccagaaagaatgcaggaatgaagtcatggaaccagtgaccttattgatcttggtggcatggttcttagctcctgagaaagtgcaagccttgtccttgcaactaacatatcaggcaccaggaacaactctctgctacttagccacatttggaaaaggacaacctcccaagtcagtcacatcaggcaggaaatgactttagagacatgcagcagtgcagcaactaaatcgtttcttttgaggggaaagaaagcctgaacagggagaaaaattctagtttccttcttgtagatgccgttgggtgcatctggacagagaagggaaaaccaagaagaatttgtgcatgtgagtaaacacttcattcatgaacaagtttctcttacctgaaggcccagtattgaggtgacttgggggacagcctcaggtgttttctggaccaggtgtttcctcggctgttccctaaccacacgtcataaccactatcggccagaagaaaagccaagctgttgttgggcaagttacaaatccagttgatggcagatgcaactaagccatgctgcagatacacaactgcctttggaactgaaaaacagacaagaaaagttccttccctgactccttcagcctgcttgcaaactctgttttctgatttcttcacacataatcaaggttacgatggaattttatgtcaggaaagcccagggtccattcttttagggactcttgtacatgtgaataagtcctactttccccatttaaaaggtgaagactatgtataatgtattatgttacctctgtgtttgttagaatcacaattttctggttcaaaatctatcatgttgtatacatatgtgtttcattttatttatatattaggatataatagcaaatgttctctcctaggggaggtttaagcattcaattaaaaatagaacatataagacatcccagcaaaaatgaatattagctctactgtcatgctcattcacattattttatttcttcagaagcatcttgctgggagctggagagatggttcagaggtttagagcactagttgctcttgcagaggaccagggttggattccaagcacccacacatcagatttcaaccatgtgtaacactaggtctaggggatctgacaccatcttctagcctccacaggcaacaggcacacatgggggatgtggacatcaatgcaggcaaaatgttcatatataaataataaatctaattaaaagaaacatcttattaaaacttttaggctttcctgaaataattcaaatgataaagttgcctagtgttcagcaaatattcaaaaaatgacaactttattatcattgaaagtagtaaagtgttccttccaaatggatcactactgtttcctacacacagcagagagctggaaaggactctttaaggacatgagaggacagcattagtgggataaaacttgcttaaaagaataaaatcacactgatttgcctggggatgggattatacattagttagcctcaattaccatgtattacaatggaagagattatgtctaaacccggatttgaatatcattaaagctaaagaaagttttcaggtgacacagatttggaagggaaactgatagatcttggcaactgactgtatttaggctgtcagtaagatgactatggcaatgataactcccttgtttctaacctatagagctactaatgggaagaggatacactaccctttgcttatttatttatgtagatggagaaagaaagacttggggaaagggaaagaccaaataaacagtatacataaaaatggcaaaatgttttaaaagttgtgcaaattaaacagaagtaaggatgccttaccttctctgatagaaaggaacatgacccattgcagacagaaagcttccttgctactgccaggacacctagttatttctatttcaggcattttgatttcaaagcaaagtaaatcatacctgttttccttgaacaccctttgccatgaggaatccggtaaatcccaaggatataaccatcctctgttacaacatcatatttttcataaggatagccccagtaagaaataagttgactctgaaaggggaaaggaaaatacatacccataattcagtttgctttttatgtatacatcacaacatagtttttgtagtatcaatctactgctcatgagtctgtgcattaggtaacagcatatagcaggaaaaatatatttcaggaagggactgaatgcaaaggggtaatgtaatggcaacatttaccatcctcaggatggtgtataaatatgttgtgggcttagtgttgctaaccatggtaattaattcttaagatgttttggcagtaagaaatataaatagtaggctaatgagagaaaccacaggagactgagagatatcttttggctaagataagtgatattctaccaatttggctccaaggggctatgaaaggaagtggttatcaggagccaggaagagaaagggcagggccatatcaagggcaatgactgtctaagataacttcacaaaatagagcaagggcaattcaaaagagcaacaaaaacaaatacccaaacactaattctcactcttctctttctttctacccatactgctcaagatttccattgggtagttggatattcaaaataaagtaggaggccatttagacctagtccttatggaccaaccttttggatagaatgaaaagtagaaacacaaaacaagttggaagggccagaagaagctattctatccacagacatgcacagaggcagaaacatttgctctacttcatcaacccttttaagaagtgtttacaatagaactgttcaaattttagaattgagaaaactgaagatcaggaaagttagtgatttatccaagataatacattaggaatagagaaatgttcaactaagggaacagtaagtttagctccaaagtctatacttttatcagaagattacaatttgttcctgtgaggtacaaagtccatgcttaagttatgctattcctttggaattaaaggtacataaaacaaccttggcttattgaacctcaaaagtacacagatgtagctcacaaaaccatgaagatggcatgcacaaagcctcaggaagaattctaggtatgtgacaggtgataacctaaataaatcctgaacctcctcttaaggaagccaccacttaaaaacagacagatagacaaacaaacaacaacaacaaaaacccaccaggattgttgcagcaatgtgtgtctagagctttcaattctaggattagctagttttggtgagcacaaaacacaaagttcagaattactcattagagaaactcttgatacacaaattatacctcaaaaagtgagcaatcagtaatttgttatcttgctctgcttttgttttctcaataaatgacttacaatgttcatgttggcttcaggatttgtgatgctcccttgcttatagccacacataggtccgggaagaagcacacaccatgcagctgctaaaagccaccacattttggagtctgcctggaaaagcaaatgtcaatgcatttgtcatcaaggagaaatcttgcaaaaggaaaattggtgtgacttttttttaacagcacttatgaggaggaaagcagaaacataaacttttaggcatttttaaatttggttatggcatggaatatcatgtttccttcatctacaatgattgaaagttttgctgggtatagtagtttgggctggcatccatggtctcttagtgtttgcagcaatctgtctaggaccttctggctttcaaagtttccattgagaatttgtgtgtaattctgataggtctgcctttatatgttacttggccttttttgtttgcagcttaatattctttatttattctgtatgtttagcataaataatgcctttatgtagtgatatcttgcttgtacaaataaaggctgtcagaagatcagaggatggagcttgccactagctaaccatagagggcaggaggtctatacagacaaacaggaagtgaaatggctgggcagagacaggaagtgagttggcagagtagaaagaggatacaagtgggaagaaactaccaccaaaaaataacaatcactcttcattaatatctcttaatatcaattgcctcaattcacctatacaaagacacaaacaaacaaaatgaatatgaaacaggatccattcttctgctgcatacaagaaacatacctcaaccagaaagacagacattacctcagagtaaagggtttggaaaagattttccagtctaatgaacctaagaaacaagtgggtgtaactctcctaatatctaacaaaatagacttcaaactaaaaatcactcaaaagagatggagaaggagacttcatactcattacaggaaaaatccataaagacagcttatattggaaaggatatggagaaaggggaactctcctccactgctggttggagtatcaacttgtacagccactttggaaattagtatggagattccttagaaaaatgggaatcagtctaccacaagatccagcaattccactcctaggcatataccctgaagatgtacgctaatacataagggcatctgttcaactatgttcttagcagcattatttgtaatagccagaacctggaagcaacctagatgcccctcaactgaagagtggatagagaaaatgtggtccatttatacaatgaagtactacacagcgggggagttggggggacaacaatggaatcttgaaattcgcaggcagatggatggaactagaagaaaccatcctgagtgaagcaacctagccacagtaaggcaaacatggtatgtgctcactcatatatgaattttagacatggaacagggatttccagcctacaatccacaccatcagtgaagctaggagacaaggaggattctgagagagacatacatggtgccccagagaaggggaaagtgacaagatctcctgagcaaattgggagcatggggggaggggagagataggataatgagaagggggaaagaggtgggatgaggaagacatgagggagcaggaaggttgagttgggggaagaatagaggagagcaagaaaagagataccataatagagggagccattgtaggtttaaagagaaatctggcactagggaaatgtccagagacctacaaaaatgacaacaactaaaaatctaagcaatagttgagaggctatcttaaatgccctcccctgataatgagatggatgactgacttatatgtcatcctagaatcttcatccagcagctggtggaagtagaagcagacagccacagctaatcactgaactgaactggaatccagttgcagagaaggaggagtgatgagcaaaggggtccagaccaagctggtgaaacccacagaaacagctgacctgaactagggggagctcttggtccccagactgatagctaggaaaccagcatgagacttatccagaacccctgaatgtgggtgtcagtgaggaggcctcagcaatctatggggccttgggtagtagatcagtttatccctggcacaggaatggactatgggagcccattccacatggaggggtgctctctcagcctggaaacatgggggagaacctaggccctgcctgggatggtatgacagactttggagatcccccatggggggcctcaacctccctggggagcagaggggaggggtatggggtgggggttgagggttagttgggggacagaaacaatagagactctttctgtgtcttattgtcccatgataggaactgctggctttattaaccagacatttaagcagcatttatgaggacacatgaatcacattcttgactaattcacaccacaattccatataagggaactcccccagtgttcagaaatagaggtgagactgtggcggaaattatgcttcaactgaagcctccaggaagctgcagaatgtttttgtttggagaacatacagatacctgtgtctacatgtggctcccttatcagtctgcttcctcagtggtgaaggaagctaatgatgaattctacaagcaaagtttagggttaaagttgtggctctttttctcagtggttgtggcaatctacaaagtttaggtcccagactctcaccttcagaaagaaagaacagccaggagacatgactcctatgctcccagggcttccctgggctcacttcagttacatacctaagacaggatgtgttggtttcctctgttactattagctatgtgacacaaggttcttccttgtctgtgtcatcaaaatcataactgacacctacatgaagatttggcttaagataatacatcctaatgtaatacagagatgacaaacaatatctacaaaacatggaacaatgcttggctcaaaacaagttgtcactattattctattactcgatgactctgtcacatgtgtgtattttggctcttcggctacttcattggcatcttaagcaagtatcaccttgcatatcagtctgattttcttttctgctcctatgacaacgaacaacatgatcaaaagcaacttagggaaattgaaaagatttatttggcttatactttcaggtcacattccatcattgaggggattcaggccagaaactcaagcaggagttaaaaaaaaaaaaaaaaaacagaaaaaacaatagaatatttcttactggttcattcagtctcatgcttagctaattttcttatgtagtccaggactacctgctgagggaataatccatagtgggctaaattctcttacatcaattaacaataaaggcaactccctacatgcatgctgacttgcttactttttttcactttgacacaagctaaaataacctgggaggaggaatctcaattaaaaaaaaattcttcatcagatttccttgtcacagcctagagtcacatgaaggaagtttcaattgagggatttcccggatcagactggcctacatccatgcattattttgttttcttttcttttcttttttgattaatgactgataggggatggcctagttaactggaggtagtgctagtcctggccaagtggttctgggaggtataaaaatataggctataccatcagcacaggcaagtcactggggatgggctttgcggtttcaaaaagccaatgtcccctcccccatcttcctttcctgtggctgtatctcaggatgcaggtcttaactagtgctccaacaccatgtcttcctgcttgttgctatgatcccaacaacaatggattcatgctttgagactgtaagcctcactaaactttttgaatgcctctccttaagttcctgtcctgacttctctaggtcctactctcagtgatggagaattacaacttaggagttgtaagataaaaataagccctttcctccccaagttgttttcttcttcttcttcttcttcttcttcttcttcttcttcttcttcttcttcttcttcttcttcttcttcttcttcttcttctttttaatttttttttggtttttcgagactgggtttctctgtggctttggaggctgtcctggaactagctcttatagaccaagccagtctcgaacttacagagatctgcctgcctctgcctccctagtgctgggattaaaagcgtgcactaccaacgcccaaccccaagttgtttttgcttatggtcttatcacatcaacagaaaacaaagttggataatgcatggatgtaggccagtctgatccgggaaatccctcaattgaaacttccttcatgtgactctaggctgtgacaaggtgacagctaatgtgatagcacagacactacctacagatgtaatgttatcttttgcacctctagcattcctcatactaggtattacacaactcttttaactgagttgtgaaaagtaactgaactgcatattttgtaccaataccacttttcaacaggataacaaggggatttaagaatttcaatgctcacactgaggaaatccagagaatcatcaggtcacactttgaaaacctgtacttcacaaaattcgaaaatttaaaggaaatggacaattttctggataggaatcacataccaaaattaaatcaagagcagacaaacaatttaaatagacctataatccctaactaatgaagtagaagcagtcacgaaaagtctaccaaccaaacaaaacccagggccagatggtttcagtgcagaattctaccagacattcaaagaagagctaataccaacactcctcaaattgttccccacaacagaaacagaagaaacattgccaaagtcttgttatgaggctacaattaccttggtacccaaaccacacaaagacacaactaagataaagaatcacagaccattttccctcatgcgcactaatgcaaaaatactcaataaaatattggcaattggaatccaagaacacaccagaaaaaccatctaccatgatcaagtagacttcatcccagagatgcagggatggttcaacatacaaaatttgtcaatgtaatacaccatataaatgaactgaaaaaaaaaaacccacaggatcatctcattagatactgaaaaagcctttgacaaaaatccaacactccttcatgataaaggtcttgtggagattagggataaaacaaacatacctaaacataataaaggcaatgaacagcaagcaacagccaacatcaaactaaatggaaagaaaatcaatatgattcctctaaaatcaggaacaagacaaagctgtccactctctccatatgtattcaatattgtacttgaagtcctagctagagcaataacagaagaagatcaaggggatacaaattaggaaggaagaagccaaactttcactatttgcagacaatatgatagtttatataaatgacccaaaaattctcccagggaactcctacagctgataaacaattcaataaagtggcaagatgcaagattaactcataaaaaaatcagtagccctcctatatatagacgataaacaggatgagaaggaaatcagataaacataacccttcacaatagccataaacaacataaaatatcctggggtaactctaaccaaatgagtgaaaagcctgtatgacaagaactttaagtctttaaaaaaagaaattgtagaagatatcagaaaatagacagatctcccatgctcttggataggtaggatcaacatagtaaaaatggcaatcttactaaaaaaaatttacagattcaatgaaatccccatcaaaatcccagcacaattcttcacaaaccttgaaagaaaaatactcaatttcatatagaaaagcaaaaaaaaaaaaaaaaaaaaaacaggatatccaaaacaatcctgtacaataaaggaacttctggaggcatcactatctctgacttcaagctctactatagagctatattaatgaaaataccgtggcactggcacaaaaacaggtaggtggaccaatggaatcaaatagcagatcctgatattagtccacacacctatgaacacctgatttttttacaaagaagctaaagttatacaatggaaaaaagaaagcatcttcaacagatggttctagaataattggatgctgctgtgtagaagattgcagatagattcatatctaaaaccatgcacaaaacttaggtcccaatggatcaaatccctcaacaaaaaactagtcagactaaaccttagagaagagaaaatgggaagtagccttgaaaacatagacataggtgttcacttcctaaatataacaccagtagcacagacactgagagcaacaattaataaatgggacctcctgaaattgagaagcttctgtaaggcaaaggacacagacaacaagacagaatgggaaaaaatcttcacccaccccacatctgatagatgactcatctccaaaatatacaaagaaatcaagaagctagccaccaaaacaccaaataatccatgcaaatttaagtcagatatgtgtaagacaccttcatagcccaagaaagttgagaaaattgttatgaaatttgtgtgtatataaaaggaaacagaaaccattgatgacttacccactccttcctcttgcctgtccatctgtccgtctttcctttttcattttctctcactttttttgagacaaagtctcactgcactgccccagctagcctggaacctactatctagagcagcctggcctcaaacttgagaagactgcctctgtctgctaagggattggaatgcaggtgcgtgccatttattcctgcttaatattaatattaatattttttgagttaagaactatacagataagaaatcatcccatgtttacatctctcatccctaggatgagggagtaattgaaagagggagaagcaaaggaagaagagaggaagaaaggatggaagcaaggaagcaaggatggaaaaaggaagagggaaatagaaagaaatgaagaggaaaggaaagaatgagaagggaggaaggaagaaaggaagatggaagggagaggaaagaaaagaataaaggaggaaaggaggaagaagatgtaggaaggaagaatcagttgttgcattaaaacagcagaagcctagactgcctgaatgctgttttctttgcagtaattggcttaactgtctatgtcttagtaattcccaaatttagttcttgataaataatgttcctgttcaacacaaaagacatttgaattatttatttttatgcattttctgagagatattagcagaaagcacatgaccttaatgtattaagttaattttcagcagattaaacagcaccaccattttcctaactgaatacaacaggtaaaataaattagccaggtacttagtataatttgacagataccatgatgacatactagtctagagagagagcaatagtaatcaaagattataaaatataaattgttaaagtaaatttaaaagcaaagaccaacagcctgctttacataagcaacatagtttaaacacaaagggaaatgggttgcaagtaaaaggcataaaatttaccacataaacagtaaccctaatgagtgggtgtatttacatcaaacaaagcgggtttctacacagtgctgttagagctatgtcatagtgttagtctataagcaaggcaaaaagcaggacagagaaaccctgcatcccggcatttaacaatagacattcagaagacatgaagtctgacatagctaaaggcatctgctagtcagtgtcttacctccttctacctgagccaaagcacagaaaccaaaatccttcttgcctacagcagacagtagatattagaagtcctatgtgaaacagggcataaagacaagaaagactactttgtccatctccctcctttgttgatattatctcagagaagtcctactgcacacctggaaataaggaatgttgcatatgcttttctggggttccccactcagtctgttaccattacatcatgccctgtgtgcaagtgcctttctacacagatacccatttaccatcaaattcagacacacaaatagagagttttcccttggtattgagcttttcatatttctcttgtaagacaaattttaataccaaggtgcatgtttgtaggtcagagtatagctttggcaactgttctttcttggccctctgtgggatgcagggattgagctgagatggccaatcttggcttcaagcccctcttcctgctgaaccatctcattggccttcgggatgtccatttctgtcccacaaaaattttattgaagatatccctatgcctttctgttgtaaacttgtcatttatcacaaggttccacatcattatggatggtgaggaaggtgtcacatgtttccagcccctaaagtttcttgggtccgatttagagtggctgagacacatgactgtttcagagtcatagatgagatcctgaggcaaatggcaaagcctagcagggaaaatagagttttacttgatttttttcaagtcaaagtcttgttctggcctgtagtgcttcatgaagaaattcaaataactgttcacacaatgagaagaaaattagtgtacactagtttttagcttgtgatcaccttggtgatatttttggtatggaaaccaaagtactgtggtgttctgattcatccattcccagagacttttccttttcatttccttttctcggttttctgatatttgtcccaaagaggagaaacagcggggtgagaatccaggcacagggctttatatacatcatgtttaagtcagtagtgagttcacaacttttatcagatgagagtctacttgcccaactcactctttatcactgttgtgtggtaaaggaaaattgttgtgacaaaaacacctgacatactctaagaaacgagataatcctcaaaattgaccttgggaaaagaaaagatttctgtattatagtatttttttcaatggcaattactctataagtcagtttccacttctttaacagaagggttgaaaagagatctactcaactagctagcaggaagatcataaaaaataatctttctgtcttctccttccctttatcctccttccctctttttgctgtttctgtatagcccaggctggcctcaaactcaccccatacccagcataccagcacttcctacagatgcatcgctaatgacacagcttcagaaatagttccagcaagtaaatgataccatttgagcctagctttgaatcacttacatatattctgaaaacggaaaaggttaatgaagaattttgtttcactgagaaagacagcaggtctaaaacttctattaaattttcatactattaaataaagagattttcccaacagacgatatggggtaacaaattaccatctattgtttcacagaaaataaaatgcagccatttaactttaaaatgccaatatatacaatgtaacataaaataaatgcttattagctattggaaattatgatgaaaagttttatagcatcctaaaaactcgacaagcatttacagttttggagattttacttcagtttgaaaaaaacaaaaacaattcaagaagctgttgcaaatattaataacatgtcattattttaaatgtcaaaggcaataaataaaaagataagattgtcaaaaagactgacgtaatcagtctaaaatgataattacacttggttgttggatataatgctctgtcttcttacaccaatttaattattagtttgtatcttttaatgactttattagtttgagttacttttaaaattaaaggtggtttaagataatttgatgtcaatgtaaaaacataaattcacttaaaataaatgacctctgaagctctccttgtatgtgtgctgttctggccctgtcccaagtccccatgattgagaaacaagcactctatgtcctcaacccaatgctccatttctgtttataaattagagtctacgagatcaagcacttacaccttgtaatcttcacttcagtgcttccttaaagtatttatttattttgtgcagcagtacaaatgtttgagtcttctagaagatgtttgtctgctgcttaaagtatttggaggatactagtctattttacagttcattcttacttccaaaactttgcatgtggatctacaactgcaaggctcagaggcatatgacattcatcaatgtcaagtacagtatcatgagctgtttttacactcctcagctggtaactctattataaaggaacagaaaataatgcaaataagctccttcataaatgacaggagaatattcacaatttttataaatgatgggtaagcaggcctttgcctattagtgggaccaatattaccccagagattacctgggttatatttcatgctcaaggcaattggaagaggcaataaagaatttataaaaagcaaatatttaaaaaaatatgcaagtaccaatttctaagtctctacatgtacaaccttgaagaaagatccattaaaatacctactgctacctttcactgggtaggcacttgctatgtctcctctcactgtgattctaagagaatgatatataaagttgtttcaaagggaaagatcatccccaaatacctagaaaactgtaatgtaactccctctctgaagtggttctattattcactctttgtctgtctgtctctttctctccatctggtttttccttttataaattaaggacacacagcaatgggttacattatgatgttttcataataatctatctcttgcttaacccaacagactcaaacatgggattcctcacccatacctaaactcatgccccctccaagccttcccatgtctctctgacataccatgacctggccccttcatacagatggacacttattaccagatctcaactcttctgagagccagtcttcaagtcccgagagagcttcagattgattccagtttcttcctgggttacctatcagtgaaactcgctctgctctaaacaatccagaagatgttgcaatcggaaatttcccaagtagatgcagattaattatggcttcagatatgacggagactgctgggacagtcttgctgggtgagttattagtcagtgatgaaaaagagagtgatgagagaactaaaatgcctgctgctgccaagcaatacctcaagcgctgggcctcaaggaagaggtgggcgggcagcttctgggtaggatgtgcattatccactcggaaaatatttttcacctagaaaggctgccacacacctagccatacaagcttctctatcacattcccagtcctcatgtaccaaccccttgcaacacttctggtactttaagatttttaaccgttttgctttttagaagtgtcaagaagtgcagataatatgttgtcccttttctctctctctcctggagagatagcgcacaaatcaagatatccagatagctcaaaggaaaacagaagattttgttctgttctccagaaagtctcttccttgtcagtatgccattcaaaggtttacatgctcagaaataatttacagaggaagtcttcctgaacaaatttgcaaaattttatcatagttaagacatgatcacatattctcagaacacatatgaatcttgtaaacaacgcatgattgggggactgaagacaagattctggggttaagaatgtgtattgcttccatggggggtcttcagagtctgtcatatcctttgggatagggcctaggccctcccctgtgtgtctaggctgagggagtatccctctatgtggaatgggatcccaaagtccatccctattctagggataagtactgatctaatacaagaggccccatagatttccgaggcctcctcactgacacccacattcatggggtctgaatcagttctttgctggtttctcagtgatcactctgggggccaagagcttccacttgttcaagtcagctgtgtctgtgggtttcaccagcctggtattgtccactttgctcatcactcctccttccctacaactggattccagttcaattcattttttagctgtgggtgtctgcttctacttccatcaactgctggatgaaggctctaggatggcatataagttagtcatcaatctcattatcagaggagggcatttaaggtagcctctcaactgttgtttaggtggtaagttggtttcatccttgtagatctgaagacccccccatggaagacctcactctccctggggagcagaaatggttatgggataggtggggtgtttgtggggagcaggggagtcacagagaaaccctgtctcgaaaaaccaaaaagaaataaaaataaaaataaagtgcacttacaatgcagaatgagtctgccaagttaccactgagctgctgctcctccagtttcatctaggcatagagatttttatacgagtgtcttaaatatatacttccaagattttatgtttgtaaaatgtgccattatgtattgtatgattaagaaagaaaaatatcaattatattagtaaactatcatcaattatataaaagctttggaatatagagcataaatacagctgtaacataattttaagtcaacaatatagtctgttacagtggtaggataataaatctttataaaatgcgttttatgattcaaaattatatgtttgctaaatccatgctttacatgttatgaagtcacatctcctagtgttctgcaccataaggatcttattcctttagaggctctaagaaaccgtaactattaagaagagggtcctgaaacaagcaactcattatctttaattgtcatccttatcctgcatgatagatattgcacactccatcatgcagcttaggagctaaaaactcagagacattataacttggatatagaactggccactggagggtaaacaatggaacattcaacttctcctggaaaaattacttcagagagtatgaagtacctgaattgttctagtatatatgcttttgatgttttgtgagaattttacagtccagtgtctatttgtagacataatctgcatatttacatgtatagaaataaaaattctgtttaaataatatggtctgaagatggcttcaaagccaatattattatccattaaacaacatatagagagggcaaatctgccccactgaaaatgaaaagcagattttttttgcatttgaaatattttctatgtaaatctattgtccatgtgtgtatctttacagaaaacacaatattaatacttttaaagaagaaaaaagaaaaattaattgtgtatttggtgaaggcaattatgtaagttgagaaaagccaacatacgggaaatgtaattatttgtaaagacagaatttgaaaataaaattcaatgaatattttaagatattgtgacagcattgactaaagtgtatactttagaacaatagtcctctggaaagatgtttaaaaccaggacttcttaaactttttgacttgcaactcattttgccaagaaattttgacttggcccacacatgtaagtcaatgaaaaaggcacacaaatcaaacaccaatgccaattcataagtttattataaaacatttgatatatagaatcataccatttactactattaaaaacaagtctatacactgattatatgggtgtgcttagttattttatataaataagtaaatcttaactgtatacttgattcttcgtcatagagagcatcttcaacatttttagtaattgatcaatagtttcatttaataactgtcattgataacaacatttttatataaatgcattatacagaatggcacaactacatttaatgtaaccagaaattgctggaaattttgtctgtatctcaatccataatttatttaatggtgttaaaatagatcttatgtcagtaactaagggtgatttttttaaaaaatgaagcattctaatataatgcaacccacagataagtttcattgatacttacatgctgaagactgacagtaggaaaataatgaatttttgttttctgtaactaaagaaatatgtttctgtgagagtgggaagcttaacatgcacagttaaaccactgcagttcacagcacataatggttttgggatcagagccaaggtggttcaagatgtgtttgttgatggtgtgtggttaacgacacacatagtaccagtgtacatgtgcattcaagaccaaagctccaatgaggttgtgtagtgaaacataggccagcactgacagaaatactgttgatttgttacacagttgatttggaattcattctagtttattccatgctgagaaaatttttatctgaaagctttcatgatccttactgttagttgtgcaactcctgctcccatataaggttcttttttttttggacccacagtaacagcacattcatgaataaaagtgtttgaaacacttttgactttgctttcagagatccttgctgagtattatctgtatggatgcttctcaatgataaaaaactttattatgaaatataaacatcaatactaacttcagaagcaaaagaaaaacatgaatatgtttgaggaaaatgtaaaaggcaataaaagaatatgaataagatatcactatatttaaaagaggtataggttatagttctatcaagtaataaaactattaaagagtataaaaacaatgtttaaaaatatgtgtgtatgtatgtatatgagcatgaatgtgccaaggtgagcctatggaggtcagagaacaatgggacttgattctttcctcctgccattttggtccttggacatagatgatgtaggttctaatttgggttagtaggcttggtagcaagtgcctttacttgctgagacatcttgctggccccatgaaaattgtaatgtacttggcaagctagaataatcctggcttaaaataaaaagataaaggcttacctatactctataatcacttataaattatgaaatgaatgcaaaataaaatatcttcaaatatattacacaaagaggggaaataacacaatagattcatcaagtagttagaacacaaaaatgcttgagattgataaagggtagattattttccagataacattagggcagttagctaaatatttggaacaaaatacaactaaatagctatctcatgccaagcaataacagaaatcccaattaaattagtgtttaaatttcaagtaaaacaatacaatgatgtcaaatataacatcaaaggcaaacataacaaaataaatcatcaagctacataaaatttttatatttctttttctgcaaatacaacaaggaactttctcaaaacctattttggttgatgccagggactaccccaaccagacatgggagtccctgggatttagggtcctcgaagactaggtgggtaaggatttgtggtgacaaacagaaacaaacacagaggcagtttgaatctgagtgtattttacagctctaaagcaagactttttttttataataaaacaaacatcttctctgagtttatgttcagtgaagcagaccaaatgacatcatcattactaggtacagtaacacacaacttatccaaggctaaccaaaacaataaatcagaaaatcattcaaggctaactgcagctaagatcaggttaatacatttttatggttattatttaaacattggttgcctaactcctgtgaatctttgaaatagagctatttttgctatttcttattaaagagctttctttaccaaacatttaaacccactctctattatacatgtacagccatatgaaattttattgttgcgaaagtttttatcaatactatttgtacctatgtgaatggtgtgaatgatttaaaaagcgatggttttcccagagacgaggtcatggtcagtttctcatttatttcttttgtttaaaatgtcagcataggctttcaggaacatttccttaatatgagaaaagaatagaagaacaaaaattgccatgaggcactacggctcaatatttttgtccgggcaagagttttcacaaccgtttccaggagacctcattcttttgaagttatcgcctcagtctgtggaacttgtcacacaaaatctactagatgtggtgtgttaagttgataattaggttaaagttttacttaatccacttctgctgtcttgcttcagtaggtgtcacggaatgctttcacagaattatggtatttggtgattgtatgttcatatttccatacttaaaaaaggaatctgcattttagtttgttataattaactgaagagttgcggaagagtgaagaatagaactgtcccttcctggaattttatattattttcttctttaatcaaaatcacaatgaacaatacattcacatatatgcagacatgcatatacaatggtgtgtagatacacatacgattatcacaaagattatgaattggatgtctacgtaaggagcatttcccccaactaatcacaaggcagaaccccagagttcagaatattttctcatgttgctctgtatttaggcattagatttactgtttatcaaacttacacatgttttatgtattcttttgagtgtatgtgttacctgacaacatttctttgttttggggaatgggtgtttgagacagggtttctctgtggctttggaggctgtgctggaactagttctcatagaccaagctgtcttgaactcacagagatccatctgcctctgcctccagagtgctggcattaaaggtgtgagcctccaccaccaggcgacatttttaaaaggattttgtgatctatataatttagtggtctaaattgtacacaaataacaatatgcaaagataaagtatttacactgtgtcgctcaaagaaatgcagtctatgaagagctttatagcccattaacaaaggacaacccagctttgaggtaggtagaaacttctttagccaatactggagacaaagtacacccagtcttggcaaaaggctgagaaggtatgttggagacaaattaatcatgctatttacatttacagtttcatgattaaagttttaatctggaaagtgattggaatatatatgtatatatgtgtatgtatgttttacagttgtgaaaaatatattttagagttttctatcaatggaagacctgcatatgggtaacagaatttatattctggaaagggaatcatgctaccaatgagagtgacagcagagatttagttccaaaattttaatatccaaacaaataaccagaagatatcactcaaatcatattagtacccagaggactttgtttatagtgttggttcagactctattgacctctgtagactctgtgattctttatttctgtcagtctggttattgataccaaagacccaccacaatgtggagcacattttcattttggcaaactagggtaatggcaatgaagtttgaaaaacagtttccttccagatttgaagtctgcctattgcttaacaagtggctcagttttgcaaattcttaagtgggtttttttttcagcaaggacaattatgtaattataacaaaaaaattactattagaatgtcagctataggccagaactatgctgtttttgacctacatatattaatccttacaacaatctggcaaagaaggggtgactttcctctcttacaaatgaccatactgttattgaaatggtgaagccacgcatccagaggcagggtaagaccagtgttttgcttttcccacagtgggctctcttttctaacataacatcagaaaggaagggtgacagtgcaagcagtgggcctagaacagcccttgatatctaataaataaatattcattaacacccttttctctctagacagagtcaatattacatatttaactatggtcaggaaaggtaacattacaaattggcaggaattgggaacgagaccactttggtagcctgtgtccctaaatcctatattttctattcctctgggtctgctcaatttactagtgtgtgtctggggtggggacctggcaggtattatgattggtggtcacaatcttataatcctgttcccacaacttcatgagactggtcatcgacagaaaaaaaaagtcctgccctagggaggcagaggcaggaggatttctgtgagttggagactagcctggtctacaagagttagctccaggacagcctccaaagtcacagagaaaccctgtctcaaactgcccaccccaaaataaataaccaaaccaaacaaaacaaaacaaaacaaaaagtcccatggatctatccctagtgcgtgacctggctatttgaagcccatcccatatggtggaatgccttgcagaggggtgggagaaggcttggtcttgcctcaactgaatgtgctaggctttgttgactccccatgagaggccttaccctttctgaagagcagatgggagtgggttggagggagccggggagaggagtaggaagagaggaagcgggaattttagttggtatgtaaaataaattaaaagataaaattaaagaagccctaatcccatagattctccttaccctgatgccatctcaacccactgtgcttcttctcttaatcctccttagttatctaaatcctttgtttaaaaattcattctcagatactaatttttctctatatacaagctgtcttgcctgtatgtttgtatgttcatcagagggtgatagctcccttgaaaccatggttgtgagtcaccatgtagatattgggaacagaacttgggtccccaggaagagcaacaaattctcttaacttctgagtcacctctccagtccttttaaaatgttactgtcagggtcttcccttccctcctttaggaatttgtacaatgtgtttcatatggcagttcaaaatggttttagttttttggggagttatcaaaactgggactgtaactgaatatgttcctgcaattttctggtacagtgtaaattagactccattaatctcaagagtcagtgtctgatgacctaaatagattcaggtgagctgatgtagacatctgattacttgataagctagggtttctcagatcagtctgtgaaccaacaaggatctctgggaacttgtttaagtgtagtttcatggactccactccagacctactgagtcagagtctcctagcttaggtttgtatgtttgatcaagatctctagattatagcacaagctaaagttggttccaatctacagccacattttcatatgaattgtgttgcaagttctaaatatacaacttggttactaacacttagagacaacccctcattaactcctcacccactggctttatggaaatagggaagggtactactttcagttcaggaaagactatttacatagtctgtaagcagcagatcacactagaacatcactctttgcctcctacagtcttgtgtaatgagttatttgcataacttcatccaatgtgaggtttctatatccacctgttgttatgacagaaaaaactctagaggtgaagaaaagatgaaatttggactttggagagagtcacactaacgccaacaaaagaattgtagtgcatattggccttcatttttagattacctcagtctgtcaagcatccctccgcattcaaatctgaccaaccaaagacctagttcagatttctgcagccatggtgcttagattttcactctagattttgttttcttttctttgttttcctttttctcttttggattttttgagaaaggatttctttgtgtagctttggagcctgtcctggaactagcttttaaagaccggggctggtcttgaattcacaaacatttgcctgcttgtttctcaagtgctgggaaaaaaggtgtgcaccacccctgcctggatcttcaggtttttttttttttctcaagtattagattcatagctgattgattagtcaagccatatttttcctgctcaaagaaacactttgtttaattttaggaagcaaataactccatgacaaaggaaaactcttagaagctataagaacaaaatgtgagaacattgtgaaatcaccaatttcagctattcccctttacttttgtgaaattccacattgttttatctcattttggggatgacaagaattcatcagcaagaagtgagaaggactcttctggagtctgtgtcaaaggtccatttgatatgagttggaaaaactaagagattttgaaacttgtctttgaatagtcacagctacatattgaataataaaaatgggaaactgtgtatgtaaaactgcataatgttacttaaaggcacaggtggcaatataagttagaacagtcaacattttgagcgcaaataacctggacaattattctagtttttgaagattatttaatacaactgcaatcaaaagtctgttgattttttgaaaacagtgaaaatttaattttttcaagaataaaggtgatggcataaacaaatttaagaatatagatttgaaacaaagaaagaaggcttaaccatattttgaagatagactttaaaagttaaagggttcaactttgtggactgagaactagttgactgcagtctgtaaaggagagtagacaggccaaaatgcattatgaaacagccaagtgtcatggaaaatacattgtataacatgaagactgcgttatacaatagccaagaaaatggtcgtatattaaatgctaacatggaaagacatgttggagaggattgtagtcttagaacaaagtgttttcctttgtgaaaggaatcagtatgatacaaacattctcaaattctgagatgataaaacctcaccccaaatgaacattattagtaaactaattttggtataatatctattctaactatttctagaaagggagaaataagtaaacaaataaataaatgaaagcagtaagaaagggaggaaggaaggaagaaatgaaggtagattcaaagagaaaaaataaaagtggaaagaaaaatctcataatcagcccatgctcatatcttctatatcagtggttctcaacctatggatcacatcccctttggggttgaacgaaagttcaaaggagtcactggggtcagatatcatgaatatgggacatttacaccacaattcataacataaggaaaattagaattgtgatgtagcaacaaaaataattttattattgttgggtcatctcaatgtgaagaactgtattaaagggtcacatctttaggaaggttgagaaccactctcctataaaaactaaccatgactttaagatcaataagtacctttaaatatttttcaggcaatttttattatgttagttttattttgaattatttgtatatctgtatctgtgcatgggtttgagcatgtgagtactggttcctgagaaattcagaagaaagagtcagatcccctggaactggagtcgcaggcagttgttaacctactcttgggaacaaacttggtgctctcaaggagcagtgtgtagctcttcaccaccgagacctcagaattttagctgtgctaacaggactctaaaaagatttgaatcatctcagtcccttgagtctcgaattgtagttatcaagattagtagtttagtaatcagcctaagtaatctgtaattgtattatgtattaagtttggcttttatgagttatatcttagactattgagaacaaagggaaacgagtatttttgaataaagagatttgccttatcaatttggaaacagacaaagactttgctcggtgaagtttttgcagaatcttcattgttcatcatgctttgtgagcagtgacctcactgttataaggcttgcaaccagtatggtgacaatgcctgtctgactccatcgttctgtctgttcacagaatataataaagattccagaaagagcttttaattgttaggagtggtgtaaatgagtacaaatcctgacacaggcaacagagtaatcaaacaagtctaggaagaaaaacaaccccattttacactaattattcctgaaagcataccttcatgctttgataggagggtaggaattgagggaatggtaatgtcttccttgaagtgcaaggttattagtgttaaaatcctatcatagcacagtgggagaagttttctgaaagaaacacgtaagtaactcagttctactttagtagaacccctgttttctgagtgagagcgttgttgtgcagactttgatcagggatgataacatgacatagcatggaatgcagacattccagctctcatccataaatctgagtagagccttatgggattgatgggaggagatgatggaaggaagaaatggggagttgtatgttattggggatttagtactcatagatacattaaatatagtcttcatggcttagatatgaactgtcttcctgaaatgtgtaagtgccagcattagatctctgggtggcgcaattttagaaggtcatggaagctttgagaggctggacctggctaacaaagtaggcaggtgggaacaggtccttggtcaatcttatctctggccctttctatttcctgtcttcatcaaggtaacaaagtttccatgacacagatcacatggtgtgatgctgttttcagatgcatggggccaagtgcttgtggacttaagcatctgaaaacattggaaaaatcaaacttccttctttatttaaaaaattttcattttgcatgctagtccatgttcctcctccctccccttcttcttccctgctctgagagatgactcagtggctgagagcactggctgttctttcagaggacctgggttcaattctcagcacccacatggtggctcaaacttctttaacattgttctctcaggtattttggttatcataatgtaaaagcaatcaattcagagacatttttaaaagacaaatatattttaaaagttgaaaacctagatataaaattgatagcatttatggtcttagaataaagaaattattagtggagaaaataaaatccctctgaagcattctcaaggaaacattacactaccgaaattgagggtggaaaccagaaaatgaaagcaaatgaaacagagaagaatgtagtcttaagatacttacatgtgacataaggccacattatgcccagagttctaagctagtagaacttcaaaaacctatctacgtgtagtgatgctgtaatcgtttttgtttgtttctttgctgtcaacttggcccaagttcgagtcatctggtaagaggaatgacaattgagaaattgcctccatcacatttgcctgcagacaggaccatggggcatcgtcttcattagtgattgatgtgtatactgtgagcaatgtcacccttagacaggttgttctggtttgtatgaaaaaggtaacttaacaagcaatggtgagcaaatcagtaagcatccctctatgcacctggttcattttctgcatccagtttcttgccatgacgtcattcccttcatgatattttgtgattaagatatgtaaggtgtaataactctttcctccccagtttgcttgtggtcatagtctttatcacaacaatagaaacgaaactaagacagtaggtaaggaaaaactgcaagagttgcagcatcatgcaggcttatatcaaggttcctgaaaattgctgactccagacagtctataccagctatggcccattcagggaagccctaagaggccatggtgtgaagctgtgaaggtgaagcctaagttaaaaataagctctgggatgttggagatgccggcatcaaggggtgtttactgaggaaggatgcagtctgaaaaagaaatgacatgtgctacaggcctccaaactggagcaagttgtctgttcaagcctgaagcccagataatgccgtcacaattctcagatgttagacgtggagcttcaaggttattctgaggcttttccactttgctttcatctgaatttccttgtcattctcccactctagcattttggaatgtgaatgctaaccttgtggcactttacacctgaagtatgtattttatttttctaaaaagcagtttttcagggattcacagttaaaagcttaatctcagtagagactcagacttctgggaagcattgggcatgctaaggctttgcacacatctgaagatggattgaatatacttcccattaatcatgaagtgataagatttttcaggtcaggagtgaaatattatgtttaaaatcatgtttggtagtaattaagatgtggagcaaatctcttacatcccttgacagatgaatggataagtagaatgtggtatttgcccacaacactattatattcagtcacaaagaaaaatgaaatcatggcattcgcaggaaaataaatggactggagattaccatactaacttgcataagccagactcagaaagacaaatgttgcaaagagagacacacaaaggcagactcacaagacaaatgaattttccttcacacgtggatcttaaatgttaatgctcattgtgtacacacatgcttctgtggaggcgtgtaagccacagaacaaggaagagggtcattcctctcaggctgcctcttctctgatgatggctaccagcttctgcccagtgctttttcagagcagcagcagcaacaacaacaacaaaattcgtctataaccaaaacagtgaactagtgatactgggtttgttctttcctacttctcacttgaaaatttttctaacatgatttattcttttaaggggttttatgattttgcaaatctttctctctttaagtgtagttttaactgtggctttggggtcaccgattactttagtttattctgattgaggcaggtttttatccttcagttttaaataataactattatggttcatagtctttgtttcctctggattttatggtctttgctgagaagtctgtttgtgtgatatatatgactttctaagtaactcataatttctccgttgtggctcttggctttatttctccatacttgaggattttaaaatttcttaattaattaattaattaattaattttcccatccagatcacagtttcccctccttccctccgtcatccctcctccctttccccttgctctccttcctatctctcccctaacctcctccatccacccctcctcctttctcttcagaaaaggtctggtctcccatgtatatcagccagccatggaaaatcaagttgcagtaagactaggcaacccctctcctattaaggctgaatgaggcaagacagtaggagaaaggggtccccaaaacaggtaacagagtcagaaatagactctggttctactgttaggagttgtacaagaggaccaagccacacaattgtaacataggttcagagagcctaggtcagtcccatacaagttttcttattggcagttcatgctctgggagacactatgaggccaagttaatggcttctgtgtgttttcttgtgttgttttcggaaaattcctgtgccacataataatcaaaacagtaaatttacagaacaaagaaagaatattaaaagctacaaaggagaaaggtcaagtaaaacataaaggctataaaagaccatggatgccagcacttactaatatacccagaaactttcaaacaccatagatggagaaaacaagatatttcacagcaatgttaaatttagatgatatatatccacaaatatctatctatctatctatctatctatctatctatctctccaaaaatccctacagaaggtattagaagaaaaactaagaaggttaactatacccacaaaaacacaggcaataaataatcccacaccagcaaaacccaaagaagggaaacacacacacacacacacacacacacacacacacacacacacacacactaccaccaccaccaccaaaataacaagaattaacaatcatttgtcattgatatctctcaatatcagtgtattcaactccctgataaaaagaaacagactaacagaatggatatgaaaacatgatctatccttctttctactgtatacaagaaatatacctcaacaccaaggatagacattatttcagagtgagggttggaaaagattttctaagcaaagagacatagaaagcaaggtggtatcactgttctattatctaacaaaatatacttccaaccaaaattagtcaaaagagatggaggacatttcatactcatcaaaggaaaaattcaccaagaggtcattgcaatttgtaacatctatgccacaagtgcaaggctatccaacccattttgtaaaagaaagattactaaagcttaaatcacatgtcaaaccccacacattaattgtggaagacttcaatatcttgtcctcaccaatagttttgtcatccagacaaaaactaagcagacgttatgattcaaatgacctaatagacatctatagaacatttcacccaaatgaaaaaagaaaaaaagaatataccttcctcttagcacttcatggaaccttctccaaagttgaccacatacttgctcacaagtaagtatctcaacagatacaagaaaattgaaataaccccctgtcctttatcagatcaccatgaattaaagctggatttcaaaacaacagaaacaatagaaagcctacaactcaaggaaactgaacaactttctactgaatcaccactgggccaagggagaaataaagaaagaaattaaagacttcccagaattcaatgaaaatgaatgcacaacatacccaaacttatggggcacgatgaacccctgaggagttaactacatgagttttttctggccatcgccattctggaagagtgtctgctatgattgctttgaatagtctccattccagcttccttttctacaccacatctctatggctttggtctctacaatgtgtcacagatgtcctcagtgttgtcattgttctcaatttttctctattactgtttaaatgtaataaactctcagcattgtctccaaattctttcttgtcttctacattatataatacattggtaatgctttccactgagttttatcatttgattttctgagttgttcattttcaacattggccattcttgttccccccccccccagaatctctgtctctttgctgaacatcctgtccaagttccagagttttccatccaagtcttcaagtgacttatttactttgtgcatttatgtatttaagttctctttgaggccactgagcatgttttgagcaaggttcaattgttttttaacaactaggttggatttttatccaacatttcagcagagttcaggacctttggattaagttaatgagatgttattatcctttctagagtcatgttgcctggattactcatgttcctttgatggaatctgtacatcttttgagatgactgtctgtcttatatgcgggtcttcccagtgagcagacttctcttgaggtctccattgcagtaccactcagagagcagactacagatcaccataaccacaacacaaaaacaaaccacatatagaaatataaaaaagtcaattaaaagtaacagaaaaggcaccaacaatcgctgaacggagaggggtaagatgatatagcataaattacaaaattaaaattaatgaatgtaaagatgataataacacaagaattaaagtatggaggatggtgggaaatgggggaaaaaagagaaatcaggctaaagtaaagacaaaagaaaacagcacaaagaagagaaataaagagactgcaatttgattacaaaataaaaatgcttaagcaaattatataagggaaagagaaatacaaatgaaaaatgtaaaaataaaaataataaaataaaactgcgcctgtttcttaggaaaatgaggcaagaatgatcataaatgcaaggcttgcctggactatggagtgagtcaagggccagcctgtgcaaatttgtgataacctgtctccaaacaaaaaatgcaaacaaagttgagaaaaagccccagcgctgtaggccttacccagtccataccaggccctaggctcaattctcacaaataaaaggtagacacacataaaaacaataaaaggaaaaaaagaagattgttaagctctgtttcagttcctccaatactggtttctctgtcttcccactctgtgtaggtcgttgtgtgttgactgatagtaggttggccggggctgtgttgtcaacaacaagcctccacttacctcacttgcttctcttcgtgtacagaaaccccttgcggaccccagtgaactctgtggcctgtgggcccgggcaggttcctatcacttcagagacacctgctcctccagtctcacaccagggtcagccatggtccatgcagagaggtgtgcatgagtacaccgaaaagtgggagcagcggatagccgagctcattctggaggagaggtgcagaactgaaggaacagtgtgtctcccgcccgggctcggctttctcccacgctgcacaacaggaaactaccaagtgggctccatagggttcactaaggaggctaagatgtggggtaaattagagtaactgctcccctgcagataaaaacacaaccgctaagtccaccgcgccccctcgtggtgaaacaaataccctgttattcctgagacttccctcttaaaatgtttggtaatccaaagccaagtggtcagccttgatatcatacacatcccagcaacgttatgtgtgccaaacaggttctatatatatatgtttatgaacatatatttgtaaatatatgtgtataattataatatattctaatatatattagagattttgtgtgtgtgtgtgtgtgtgtgtgtgtgtgtgtgtgtgtgtgtgtgtaaaacacagaggccatcaatttgagagagaacaaggagggctacagaggaaaggatggagggagaaaaaggaaagaggaaatcaatctaattatattttaatttcaaaaattaaaaaatcaaaaaaattatgggaagggagaatgctattttaagtaactatttttgcaataataatatgtcttacatctctatatctacccacttatggtattaactttattatagttaaattttgtttctagaagcaaaattctgttaggctttcagtaattctgatgtatccacaaatcattttccattttaatggcatacatactaggcctgtcagtgatttgaaatatttggtcactgagacattaaatcttatctacaaaagtccttgatacatgaagaaactaattgtgccacagtagatgtaaaaataaaatagttggttgtgaagcaaattaaacatacagcatcatcaaggttaaagtttacacaaggtaggccatttgcacctcaggaactatttagcagtgtttggagacatacttgttatagtgacttggagtgtgtgagtgctactggcatctagtaggtagagtccagacaaggttagcaataccctggacagggaatgtgtgtgggaggggaaattggaggagtggatggggagaaagctgtagtagggatgtatccactgagagaagaagaaacataaatttaaaaatatatatgtgtagatcttgcttggattctcttttaaatagctccacacttgtgagatgctgaggcatttgagatgattggatatgtaactttaaggacgtttttgacatgataatggtatcattatgtggataagagaagttatcatttcaaagttgatcctgagggaggagggaagtggccgaagacacaggtgcaacaggaatgacagagagagtggaaataacaaagaatacagataagttcatcaaactatactaatactaaatagattaatcttctatacccttaaggggaaaatgaggttcaaagttgactccaaagacacattccagtgtagctggaaacacttcatttgcttgacttttgttgattcagagaagtgagaatggtgtctgtgaacttggcactgttgagctttatatgatgagatgttatccaggggatgggcaaaggaatcccatgtgagtaaccctccccccaacactagggatatgcccacacttcagagtagcaatggaaagagtgtaagtgagttgctgtggaagcaaatacagtgacctttacctcagttcggagaacaagatccacactgccctcatcagctagacacgggctaaaataaggcagtcagggttggaaatgccagaaacttaagaatacaatagttatgctttctcaggatggtatagagaacatgtttggttcttaagtgatgaaaccaccacaaatatttatcattaattattcactgaaattttaaaggctcccaagtgatcccctcttaaaatttctgccctgataagaatgaaggagaaatggacagaacataagaaatccttaagagtcctggcaaaaggcatggggcaggacaacacaacgaaaaggaacatttttgtgaaggctctctgtcttttactcattacacaggcaacaaacaaaccttacttaatatatctcatctatttaaccacactctgaacaaaaagtagaaatcagaaggattagttacatagaacctgaagtcacattgaaaatgggagtgtgataataaaactcctaagttaggggtgttttgggtgttttccaaatttggagcttttttatttttcatcaacctgtggcagatgtctattttggttcatatgctacaaggaatgtctctacatcttcttgtagataccaggacattgccagggacttttaaaatagttttgctgggtggtgactgttttgtggttgaggtctggagtaatgaagggcacactgtgcatctccgagattcctgagtttgcatccgaattgtttctggtttcctcacccatactcagtacagttgaatttctcatgtgtctcaacaagaggagtacatgattttttcagcatgtggacacagcagtggtcatgaatggtggttgggagcagttttatcatgataagacacatgagaaaagtcgtcattcagtttcaggattctgaatgaaccatggctccccctaatctaaactgagtttagaaaagaagtttgcaaaatttcaccctgtcccagaaatgtactttcttaggtgtttctaatcacagctcccaaatgaaatgttgtatttctttaaataaattaaaaaaaacaaagtgacaaatgagaactttgttgatgccaatatatttctaaagtcaaaattacagtgatacgttttctttttaaacactgggaaactgtgtgaaagaagaaaggattttggaatacacgtaactaattcttttaatcttttgccatcatggaaacgatctcattgtaaacctcttgaggagcattcatggcccagataaagtccagatgattgtaaggaagaacctccttatggtaaatgaggttttggagtttgggaagcagcatgctaacatctcggggatcagccaggatgtcgtggccaccattccacactgcaattggtacagtcatagctgacacgtcataatcaggaggtgttctctgaaacatgacaggtaaaagacgtggagtttaggcaaccatgattcagaaccagtatgaattgtgtattagttccaaataaaatcaaatgatctattcaaggaaatcacctttacccacagagcaaaacaaacatcatagtttggaccaatgcttctcaacttctaataggtctgtcaatctgctaggactgttgttaaaatgaagactgactcagcagatctgggagcaaagtcagggatctcacactcaggggatgttgatgctgttggttctaaactaagaactaaatggttggtctgtagatgaaaattcataccaattaaaaacctagattttagttcagcggaagaaagaggatttaactagattcttgggtttgtgtgtgtgatgggtacatgcaaaccactgtgcacatgtgcaagttagagtacagccttcatattggtccttggcatccatcagacagggtctctcccatccactgatgcatatgccaagccagctggccaacaagcttttggtaattttcctgtctctgcctccctcctaataggggcacaccgagttattatagactaggcttacatagaaaacactgcacattgatctatcacgtcagcaaggatttgactagatcatgactttggcagattgcctaaaccactctgaatcatgatctcaaataggccaggatcctagtcgtttgttttgactttgtattgacttctacagtatacattatattggcatatttttatatgctatctgacctcattagaagctgctctccttgacattctctaaattaggaacctcagcatgactctttcagtagtagagcttccctcagtcatttctgctagatgttgtaagtgcctgaattaatgatggttttctgctgctccctactcattctttcactccacagcctcatctgaggggatgctttactctcctaaggactcttgatacaagtcttgatactcttgatctggtaccttaacaggatgtctcctactatttcctgctggttttttataaacctccaaattgatggtgttatattttgtttggcttctcaatcagcctgatccagggatacctgcaggatgtttttagtatcttatttaatgatgttttgctattcctctggtgattctttctatatgcacctcactatcttcttgtaatatagttaatatactcactttctcaaagctgaaggcatggttattataaaccactctttggcctgtacaaaagaactgcctgtatcatggcatgaactgtggttcagttaataagctgtatctactgcacactcatataattttactaaatattgcttcaaatcctgagaaaaaacattattggcctggctttttatttctagaaaaccactattaacacaatgagtttataaagatttacaaaacaagtagtagaacaagagaggcatctccatgattcacatatccacacacactctacttaggtacttttgttttttagatattatttcaaggatataaatccataaatccaatatccccaaagtttgtgtcttcacactttgtgaacaaaccaatgtgcaaaacatttattacattattgttacagtaatttatgccttttcttacattccctcacatgttggctaaaatgtggagaatatctataatacactttgttttgcttacacactattgaggaaacaccttcctagatgtcatctctgctactaaattaacatcactgatttcaatgacaattaaatagatgtgtgattggctggaagaagggtagacttgatgattggttctcaggttcttgcttggctatctatgattgaatcctttggttaccagaatgagagtgaaataacactgtaaattcaaagcaagtctgaactttttgaattgatctgagagtattctgaaaaaatcttttaaagacatcagataagtaacagggtggggcttctctttatctgtagaatcttgttatgaaaacatatacttttcagttgtgagtcagggaagttaatgaaaattaaggttattcagctacaacttgtggagaaaattgggttgtttaaataggaagagtggctcacaaactatttgccttgctcaaaattagtcaatgataatcagagattttgccctgagcaaagggttatatcctacggataatttcgtagtctgtgaattattgtgcaaatttgtattggccaccaattagatcaactccaggctctgcgtccttttttaccacagcaagtatgaagattacaaggcaccttcatgctcaaaattatttctatctttgacctgaaaacacaccaccatttgttttctaattggaaatgtgttctgtaaaatcatttgtctggatgtccagaaggcgaggctaatgcatgagtaaaccagttagactcatgaatggacataactattaacttgcttcacccagttccacttcagaaagaagagcgtattgtggggaggctggactgtaaagcagggctgtgcaaggaccacgtgctgttattttatggaacatcttcacatgtgatctggcaagactctgaggtccatttccagagtagagtagtgggataacaagaaactggacaacaacattactttgaaaaatggatacccaattatcatactttccttcccaaacttttatgtatctgtcttttaaattgtgaacaatttcaatctcaagaaacttacctgattgtagtgtaacaggttctggaatgggcttccccaattaaaggcttgaagtctcccagctctagcaacctaaagaaaatgtatatgtaaaagttaagttaaaaattagttacaagtaattgaaattaattggataaaactcataaaccacctgaaaacaattcagcctccaaatacctcattttcattttttttaaaattagtgagaaaatattttctcattccaaataattactaaccatctaggatatgtgggttcaatacataacatatgtgagtgcaaatgcagctttgttccaacttcttttttgcatggcaaatcataaacgtaattatttctttgctactcaaagcacatattttcataagattttcatgcacaagggttaagaggggttttttttttcaggttgacgtacatagaagaattgcctgtcaggaacatcttaagaatgtgcttggggttaaggttcaatcccacaaaatgaatgctagcaacactgaaataatgatacctgggcccagtggaggatgtcttgaacagatgttcctgctggattatgacctaggtacacatcaaaacgactctagaaatcaaacacacacacatacacataggcttagacatacttggtttctgaaaaacaatcagtagctaagttttctggttcaagcaagtgttgcaggataacctctaacagaaggatgaacaatacagttgcatgacagcttagaatctacaaagcacaccacttgttttaaccatgatgagcaaggcagctgatttaccagctctatatttttttcaaagcagattttgagacccaaagaaattcaaataaatatcaggttcacatgaatagtgaccatcagtatgaggctagaaagttttacctagtttctgaacctaaattctcaactttctatttagtatcagtgtgcaagaggttaaatattatatacaggttgcttgctttgcatgattttaatttatattaaataactatacatatttacacacatatgtatatgatagttaccatatatgttcacttatagtattctatctagtccttaagtcaccttgctcagacctgttagcattctgaagttccatttccagattgcatgggccaattcaatagtgggtcttagactgtggagtaagataaccatcaccaaagagactgagctctccctttatataagcagcatgccgaagacaagagctctatttctgtttcttttccatctctctagtttgctattatctttctctgaagactcttatagatataataaaagaatcaatttgtatttttgtggagtaagtacagaattctcttttatattcctcatacataatgagaaacagcctcaaattgaaaagagcaagaagggcacgtaccaccataagtaaaacctaaaggaaaaatataaataaatgtgaatgtatttatcatcagccccgagaaagacaactaaaactccctagtctccatggagatagcagctttgttttcactactgtgttcccaatcagtacagaaatatataggttacatctgatagtagctgtgttttcactactatgttaccaatgaatgcagaaactagtaagctatgtctttaacttaaaattcattttttaggagttcaaagatatgaattagagtcaagatcaccccgtaattccagctacttgagaggctgaatcaagagaatatctggttaaagccctatgttggctatagtgtgagtgacttggaaatttaacaagattctgtctcacaaaaaatgttatttaaaaataatgaaaatatatctcataagtatagcatggtcttaaaattcccaaggtctatgcttaataccataaaatcaaaatgaataatcagccagcaaaagtgtgtgtatgtataatagtaatagtaatatgtatactatgaccattgttatgtgctttatgttatgttctatttgtattaaatatcttaggtgatttgaactttacaatagcagtgtgtgtgtgtgtgtgtgtgtgtgtgtgtgtgtgtgtgtgtgtgtttgtaaaccactacaggagtttaaatcagttccaaaagtagaatttaaattaggctgacttgaatccatatgtttaaggccctcttgatattggaatttctcatataagccttgaaactccaactccaggggtaaaaatgcagagcaagatatggataacctgtttcatagctgcactgaaatgtgttttacaaatgaatggctgtgactagaagtattaaaagacttcatgtcatttacttcatgactatgcattgtttctcagaagagcctgacataaaggttcattcccttctgtcacagatgctaaatgccacactagccaaaagtcagtcctgttttgaatgggaacaagagctgaaattggaatgagcagtagcttgtgacttctctggagtgtaccacaatgctgtgggcacagttctgaggtgatgatgaaaaaacaatcaaaagtgtttgggaagagtgtcttgaataatggaggccacaaagcatacataccacattcaagttctttctgtcaaacccacacataatgaataaagcgttgctgcagagaagatccatcagctcccgagaacacacttcagtaccaagaaattgatcaaagaaggtgtgtggcatgaacattttgtcaccaaatataatctgaaaaatgagagcatcattagaacatggcagcctccaagctgtagaaagccctcttcattgctgcaaacactcattcaggtagtgattatgcttgtgtttttctttagttctataagtagttttagaaatttcctcttctttagactggtatttctcattatatacaaaaatacaactccaaacagatcaaagactcaattgtgaaaccccaaacagctaagcttctagaagaaagcactgtcagtaccatatatgatatagaaatagtaaaggacattctgaatgagactctcttagcctaagaattaaggctaacagttgacaagtgggacctcataaaaccaaaaagctgcacagcacaggaaacaaccaattaatcaaagaagtacacaatgggaaataatctttgctagttatacctctggcagagggataatatccagaatatataaaagacaaccaaaccaaaccaaaaagaatcccattcaaaaattgacccagaacatgaatagagagttcttaaaaatgaacaaacaacacatagtggttaagaaatatcacagaaagttaattgtctctaacaattaggttaatgaaaatcaaaacaactataagattttatcttatccctgtcagagtggcaaaggtcaacaaagcaacacataataataataattattgttggtagaatgtagggaaagggagctctacacttcctgttgagggcattagaaacttgtgcagccactcaggaaatcagtgtggagaattctcaacaaactaaaactaaatctacctatctttatcactcattgacatatgcgcagagaactctacgtcatactccacagatgctattataatacatgaatttttgtggaaatatatatatatatatatatatatatatatatatatatatatatatatagtttaatgtaaatttctcatctggactgataacactctctccaagagccaaagaccctctaatgaaaactgtaacaccacccatgagaagctctgatttgattggttgaagttgttgatcagggttgtccaagagacttccaaaacagtacagattattgctattgtccttgttcgctccccagatgtaaacgacaagactctactgttcaagacacgaagcaattcacatataggaccagaagcccatgggctgaaactaacaggaatgcctcctccctaagaacggggagcaactaatagttctaatcagctatgactcctacgaaccacatcaatgagcagtatggcaagataaccctaaggttgcatggtcacacatgtactttgattgcaaccaacaactttctaattggaattcctcaataagaggaattcatgcagatatagaaaacttatctaactccccagagatagtaaagtcgtggacttcggataatctacaaccacaactgtactaaaccagcataaccccaaactacattctaaatattttgtctttatgtgcacaaataagtgtagttctgacccctcgtaaaggaaatttctcgttgcaacaggcaagagaccattatagaaaaccacaatcagtcaaaatgcagacttgtgaagccaaatcccaactgatgcatgtacaaaacaccccacacctaaggtttagagagcattgtgtaagagggatggaaagactgtaagagccatattgacagtgagtttgctgtgacactgtgtgcctttgtaatgccagaagctacatccacaaaatctcaccaacgttattgcctaaacatgagctgaacaaggatgacaacatttgacaggtgtggacatgaggaatgaccatgaggcctcaatctgacacaaggaactataggcattaagaaatgatgagaactggagtgggaattggagtgcttttccagggaagcagaaaccaattgtttatccaataccaaatggccaatcctgaaaatatatacacaagtttcactatacagaatcaagaggctatattcagaatatatgtatctatgcatgtagcaacagttaatgaataaagaggctatgaatttgaaagatatcaaggaaggatacatgggagtgtttggagggagcagaggggaaatgttattacaatatcaaatattaaataaaatattcattatgtgtatagaggcatatgcggtacatgtgtgtcacgggaagtgtgtggagattagagagcaacctgtaggagttcattgctctctccttgcactaagtgtgcctcagtaattgaatttaggttgtcagacttggcaatcagctgtatccattgagctattttccccctctttctctcatttaattgtctcaatgaaattgtgaaattggaaagagcagatacaacattcggtgtgtattattgcaattgagaactgcatagcctcttggagcaagtataagacacaaagaattataacccagctggagtaataaaggctatgtaatcaaaccatgaaataataagacagattgtcataattacatatcaaaatgtgtgatctgggtaataaattatgagatcagaggagaaaatagggactaaaagagatatctttaggaaaaatttttagacacaattgtgtagagctatgagacattttgctttctcaattttatacccaaagaaacatggctagggaatagtgtttcagtaattagtaatgaagttattcctgcaattctaatccatgcctgtgatttaatctctaaatgccttctcctttcaatttctccgttcctgctaactgataatctgtgcacaagtggaaaaaagaggctcagtgcagtaggaaatggccgtggtcattttactctcacaggttttgcagaaaagttttgttaatacttttggccataggcagtgaatttgggcttaggtgtgcatgctaatttagaaggaaagtgaatgaacaatatgatactgaagggaaagatacaattactgtactgtatttacagcctcaggctaaatcattcttctaaagcaaattgtacaaatgtgcaggtgtgcctgcatgtgttggcatgagtacaggaaaagtaggccattaaacatttgactaagtaagtgctattattacattcctgtgtgggctttttcaacaaggcactaaatattcatggtctactcatgtctatattactgtcctgtgaaatttctatttcttgggacaagaactcatagacatcccaagagcatttacttggaggttacacagtatttactttttgctcagtcattgatttctttgctttatttttcccttccccttcctcttccttcttttcctcctcttccaagttttatagccctactaggattcttatttggttatttttctaggcttttaacaccccattctctgttgcaggagtgaagctgctaccttgacacaggtgtgtagaatatttgtagaaagcaaaacactcatagcactgacaacccactgtaagttaatgaaaaccaaaggaatagatggggattttagaggcaagaggggtcgataattttcatgccgtgagtgagataatataaacatgcaaactttaggtttgtggatatgaatatgttcatccctaagaaacatttatttactttgatcactttggaatccaaaggcaattggatacctaaaatataatcacatacctttaaaagatacccaggaataagtgaaagttttttcaaagggctttgtgcgtatgtcacagtagcaactggagctaatgcataaaacgtcttgattctattagccagtgtgggattggtagaaaaggcaataaaacctgaaatagaacagaccatcagtgatgaagatgtgtcatgtgtgtgctgttctgttttcacaagtgtgatgttattttggacttgctacaaatgtcatgtgaggcaagctgtcaaactggcacatcagttattttgggatatgcgtgagcatggtgatggctctttaaaatagctactaaagaacaagagttgagttcagtcttcagttaactcaagatagaggcagagtcgagtaatttagtgtcaagatgagcagttttactcatctcaataccattcaataattttataacatgttagtgagaaaacactaacttagatgaagtgtgtgtcacagaacgttaatgttgtgtaagctccctatagccaaacacagttcttgtcagatgctggtaatctcagcactctggcggctgagtcaagaaggtcaggagtttgaagttagcttgagctacacaggacagccttgtttcaaaaagccaccatctgcaacaacaaagatgcctatgacttctaggaaggtaattccaacaactccctctcagacttcattttacatagctttttgataagttggaaacctgccctccctttgggttccagaattctggctgcttgcatatcattatcactacttctgactctttcctttgtcacagaactctcctcttgaaaatgaagggataactctgttgtgctgagacctattctctcggctgtctgaattgattccttgggattttaacttagtctcattgactgttgcctcctgtggagtgtttttagtccagtgttctttctttaacttcagatagtttattactgatccttgacatctttacccaaatctttaatagatggcatagagtgttcccaaactgagttcctgatgtccttatatatcagcttttctcacagacttccttccatatgactcttctatgtcattacatgtctcttctctgtctactcagatagtgtttgcaggattctttctgttgaaaatgaattcagaagccctctgaaaatctctaaaatcttccatgagttatatttcccatagcattaccattgtttgttgaactccatgttacttttaaggttacttttctgtccccctccatataagtaatataaaggtatggactttaacttatcttctttggtatattatttggacaaataatttgtttttcaaaaaaaatgatgaatgaaagaacaaattcagcctggatgctggaacatgctgctgtgagagtcaggtgacctggactggtatctgaatcataactttggactattcatagaggctcatgctactttcctgagttatttatctcactgcttgatttatccatctctagggtatgaggattaattgtccttatgttgctgtattgccatggacatgacattttataaagttgcatagcaatggttatgctactgggcagtggtacagaaactgtacccagtcagtgcttttacttaccaatagtggtgccctgagaatgaccaacatagtgcaacttctcttgtccagttttctgtacaattaagtctattgtggctggaaggtcatatttagccatttcatcaaagctgtaagaaaaagtaaaaccaacaaaacatattttcttgttatgctttctaaaattcaagcatatttattgagaaaactctatttcttctaaaaagcagaaaaactagacactttaattattgccagttataaacctgtagtcagcatcagatgcctttgaggggatggaggttgcttgtaagcaaaggccatatttttcaaacaatgcataatggctacaatctaatctaatgaagatagtctcaatgggtgggaattattttcatacatgaaatggaataccagatttaacaagcacttgtattctatattatgattccatataacatgagtcccatcctgtagtacattcttcttaaatcagctattacaatagaaaaatgagaaaactcttgaattgaacaattttagtggcttctcgttgtgcacagaatgaatttcaacactctctctagatccagttcatgtcaacattaatagtgttctcttgtgacactgtctctctctttcccactacaccagatgggcttcctattagttctcaaaaccataaaatcatccttgtacctcagcagcatcagccagatgctcttctgccatgcatctccattagtcatttttaactgggacacaagaaggaattgggtgcctttgataacgttcctgtgtctaaacttggggcttttcatgccgatgcaagctgctgtcccttccttccagttctgacacatccccagtgttttggtttctccccatggagctttctagcaacagggagtttgccttgcatcctccattttgctgtattgttaattttatttggaaaagcagttttaggcatctcttgatcttgggtctagagataatagcaaatttgaaggaaaactccccttggaatgaggtgtatagaagattcaaatgttaaattaaaatcatatggcttttgattttttgcctcctacctgtagaataattggctctaatgagaaagtgagaatggccacgcttctagagttcaagtacgtactcattttaaattatcctttctttacctgaaagcccagaactcaactgagtcgggtgaataatataaatttctcctggaccatgtattcccgcggctgttccccagccacacatcataaccagcgtctgccaaaatgaaggccaggctgttgtttggcagatttgcgatccaatttgtggctgatgcgagcaaaccatgctgcaaaaacaccacaggtctcttgcctaaggaaaaagattattcaaacattataaagttattccttatggtagttagacatgtggtcaaattgggtatgtttattttcttatgtttgttttttacatctaaaatatcctttcttgagtgtgactggtatgccaaaattgatcaaattatacacttaatttatttattatttttatgcatttatgtaagcctgtatgaatttatgtgccacatgtttgcggaagcctccagtggccagaagatagcatccaatctcctgaaactggaattatgtatagttgtgagcagccagctgtgggtacttagaattgaacccaggtctaagcaagagcatctagggttcttaaccactgagactctggcacgtaaattttatttttatttagtgtatttgtatttatcaacacaggaccttgcatatgatatgcaaatgtacagttgaactgtatcctcatcttatattgtgtacatgaaatgtatttactcttacatgtcagttaaatataaataaagatattaaaataatagtctaaggaaattaagcactgattaaatgtagattaagagtaataaagttatgtttcattatttttctgtaatgagaaaaagatgaaaatctaacaatgctatcaaaataaaatgaaattgtctgtttaggaaatagacctctagctacttccagccttccctctacaatacacactggttaactcctttcatgcactggattttagctactgtgttgaaaaaattgtccctgttttaactggtttagaggcctttgatagtcttttttttttaaatcatgatcgctttctcattcttctgtctcagtagacttgatttctgtctattgaaggttggaaatacaactttgcattgcatacagagtaatctagactcattgcattgttagaaagaaatgaaggaaaaaaagaaaagtgtggggacagatggagagatggatgaagggaagggaaaaaggcaaggaagaagagaagcaatgagagaaaggaagtttttacctaaattctctgaattttttttcccataaggaattctgtagatccccagaatgtagccatcttcagtaataacttcatattcttcgcttggatatccccagtaatttatcatctgactctgaggaggaaaatttaaaaataaaccttttatgttttcattaacttaaaatgcatctacccttttatgttttaattaatttaaaatgcatctaacaggtatttctagtaaattttaacttttaactaaaagtttagacccataatggctctcatcccagtaatctcccttagtaactcacaatattcatgtttgcttcagggctctctggagccagttttccaaataagccatgtgcacctccaaatgcagatatcacacttgttactgtcaacagcagccacatcttggactgccctgaaacaaaaggagaagctgtattcaggttaacatacatgcttgcataacattcagcgtttgtgactgttttacctccaagagtattgtgggattggctgagtttgactatattctgttgagcataaacgtaggtaatatggatattgccaaattcaatgtttaatatactttcatttcgattgtttcacttcgattgtgtgtgtgtgtgtgtgtgtgtgtgtgtgtgtgtgtgtgtgttttcaaatgggcatatgtaggagggcaaagaacaacttggctgtttttcttgaggattcagggtctctcactgaactggagtttgttgaataagctgagtcaatggtcagagaccccagggatccacctgtgtcagctccactagctctggaattaccagcatgcatcaccatgcccagctattttactgggttctcaggttcttaaccatgcatggcaagtatttcaccagctgagccatccacttagtcctgattcttttaaaaaaaatctccaaatgaggaattttaaccaggaattttaatcctcaatctacaggtgaagcatagttttattattctgtatgcttaagaccaaacttgctttttgagcactgagtaggattgaagactacaggggcttttgatggttttacatcaattttaacataatttgcattcaaagctatcattgtggggcaggagagttggcttagtggttgaaagcctgatgacctggtatttgattcttagaacccactcccaagagctgtcctctgacatccacatgtgttctgtacagtcacacatatgctgaaataaatgaaactgtcattgtgttaagacaattaataatagtcactttataactatttaaaggtttgaaaacactgtgaatttgaaaggtaacatcaccatctcataatgatgtcacaataagaataatgcatgggtgtaatctagaaaagtataggtcttttaattttctactgagattattactgtgaaattatgtaggtaaaactgattataaaccagtagtgtattatatggttgaatatctttttcagaaaaaggaatttactattattatttgtaagaaaaataagggctttactagttgaatcctcccatatttaatcatgaaactaaaaatttgttttggaaaataatgacttcacgaagactaaatctatgctactacctaaataattgacctgtcatataacttgctttcaaagctgttgtcattcatgtcattgtaaagcaatgcaggatggtagtaaatgaatgaaaattttagactgaaaatatcccaactgatgaacctatcttactatagataaccactcataaaccttgaatagattctagtttcttgtgtttttatattttgattactatctcaaaggataaactttgattttggaaaggaacattacaataactccttttgatcaagcaattgtaattgtcatttatcctttagtatggatgatatttggcattagactctcaatgtacttcaatgttgtaagcaccaactacgaattttagaatattcaatagtaagcttaagaaaaaaccaaaagtgagaagtggtgtttttctcttttcaagagatgccacatggaggttaattttaaataaagatctttttagtgtgtctgatgtcattcaggttttttttccctttggctagtactgtgtgctagaagcaaatttggagatcatttacaaaaagattttaatggtgaacagtgaaggatttgtaaaatttggatcatttgtttcaaatggtgttctttgaaagagggtcaggtctctgttgtgggatatttgtacactgtgtgaaaatgtattgctgagattggtgtaataaaaagctgaacagtcaatagctaggcaggatgtataggttgcacctccagaaagaaagagagagagaaactgggaataagaaactatgtgtaaaagaaatgccaggatataccaggagacatggaacaagttggataacagaaatggaaaagaggtaaaaaaaagtcatgtggtagaacatatattaatattaacaaattaagttataagagttagttggggacaagcctaggctaaggcctatctttcataattaataaataagaagtctccatgttattatttgcaggatggtagtgctgatgaaacagtactattacaggtctaagttgctgtcaatatttcagtaaacactagtacattttgcaaagttccggactgtcatggtgttgaactagagattccaagacctaaatctaattatctggtctgagaattcagccacttagtgctgaaattggatataacaatgtctttggaaatggatttaaataaatcttttatgtataatgaaaagtcttgaaagaataaactaatttataaagactaactgccactttaatacacaagctagataattgtcaggctattaaagaattagtggtttctttttagcctttgttgtctcaattaagtaatttgtctttctaacgtgaggtcatttaactaatggcttaagttattgtatatcccaataacaaaagtatacaagagcccagcagttgtggcacatgcctttaatcccagcactcgggaggcagaggcaggtggatctccatgagtttgaggccagcctggtctacaaagaaagtgccaggagaggctccaaagctacacagagaaaccctgtctggaaaaaccaaaaaaaaatgtatacaagataggttctgtaatacttgaggcatgattaaattttcaaaatatctgataccaaattcccagatagtatcagtaactttcatatgtccaatactatgcaagtgagttagttattttcactgtttttttccttttctgcaaaacagtgctaacaagagtatatttctttgtgctccaggacattcattatgattaagcaggttagcataattattattgctataattataaatatttaatgttatttacattattaacatttaattgaaacacccctattaaatacttttcatcacgttctttactttgcagatgacccaacaagatgtggaaagcacccccacctgtaattaaaactgtgctggctgtttccaaggactgtcttctccactactttactgcctcactagaatgaccttaagtcacatatataagcagtgaattggggacaattcaccaaagcattctataatgcaaaccaaacttttgttttcttgggttttaatttgaagaaatatattagcaccttgctgaccaacattactgataatgttaattcaataccagttggtggtaaatgttatgctactcaatataaaaaattatgctttctatgatgctaaagaggctgatctcaaatggataacatgaaagaatgtactcccagtagatatgtgtgacactaatagatgaattcatcaattagtaattaagaattttatttatacataacaaagaaaaaatgtaagccaaattctagaagaataatacataaattaaatggacacatttatattgtgataattgaagtaaagaaaaaaagacgaggatttcaataaattctgatcgtcaaatgtacttacagtgtcctcacaaacaggattgtgcttctctacttgcctactttccaaaggacaatttctccttatatacaaaacatcaacaatggtctgaattgattgttcattctttggttaaattatcataggtccttcatatctggacatcatctgatattaaaggaaaaccttaaaatcaaacattgcagctgtgtgcacagagcgttagctcccctcattaatttttaactaatgcaaacattggccaaaggattattgagtagaagtgatttaggaaacaataaaaatgataaccgattagagataaacctaagcttaaatgtataaaaaccgttgaacataatttacaacacaaatggttctgcgtctggacttagattaaaaagcttatgatagcaaaaaaaaaatgacttcttcataaaatagggcaccagctattgtgactggatggatagataagccaatcttctccaaggggttgaagaaacacagccccagattgttaagaacacttgagttgtgtcatgtagtctttgtgaaattttctggttagagtttgaacagagtgagctatgttagcatctatatttctacactagtatttaaatatctagcagaaatagtgaggaataattattgttggggaaaagagtcaattcgtattctagcacttagaaagttccacaatataactaactggaagtatgttgaatacataaggaaacactggggattatcaaatagtatgtgtatttatatatttctgtatactaaggttccacttccactgtgccctggtggtcattgatatccactaaatttgtaaaggcaaagatgatactgtattataaagaacaagttggaaaagaaagttttactgttctaaaacaatttcaattcagttcactagcaaatagaaagtagatttcatgtttctacacccacttgcttaaataaaagcagaaaaacatatggtctaagagtctttgggccaggcgttggtggtgatgcctttaatcccagcactcgggaggcagaggcaggcagatctctgtgagttcgaggccagcctggtcttcagagcgagtgccaggataggctccaaagctacacagagaaaccccgtcttgaactccccccacccccggaaaaaaaaaagagtctttgggaaaaaaatacaaatcctactagttgttgaaagatttcacctgaacagtaaactcctaattctttaccttaaatttcccttaaatctgattctctgggggtaattagtgtggccacataagctactaaaggggaatttagtttccagtttgcaagatgatttttacttggcccattgtcctcatattgtctttcttctttctgttatccctgatttcatcttgggtttcagcttagttgtcctttcttataggaagactatccatacattgttctttatccataaatattggactaaggacttgattcctacttccctgtaagactccatacttacatctattcaaggactatttgataggttattatagttattcactagcacacacacacacacacacacacacacacacacacacaggcccacatgcatatacacacttctgaagttcaagaactacattttgttcatttactcttatttcttaatgcctagaatttttctgtatcaaagtgtgtacatgatcagtatgcatacatatatatgtatatatatatgtatatatgtgtatatatgtatatatagtatatatggtttatacattttaattataaaatatttagacagaaaaataattacaaaattatctgcagacatttgtaaatatgtataactaatattttcaatatatacttttcagtaaccaactctgtaattcaagtaattaaaaactcacatgattgctttcatgggagcatattacaaaagaatatgcttaagtatccatgaggaaaagttggatagaatattattattattattattattattattattattattatttgatttttgagacaaaatttcttgtttagcctcagctgtcctgccacttgctctgtagaccattctggcctcaaactcacattgatccacctgcctctgcctcccaagttctgggattaaaggtgtgtgccaccacaacccagatgaatataattatttttattagtaataccaacagtataattttggtgataaagataggaaactattttttcctttaaattttattttaattgtgtataattatggtatatagtatggtaatttcatgcagggacaaattaatagttatatacttgtatatcatgtgtgataatcaaattcaaacaattaatgtttctatttccctaaaatattaaaaaacttaccagcataatacttgtacattctttgagatataatacacatatttggaaatattaactatataagacaatgaattttcatacatacatttacatgacacactttgatcatattaacccccaaatttgcctctactttgattgttaatgtggggatcaaattcagagattctcacatgtcgaccagcatccccacttctaatcagtgggctaatccactaagcccactccagctcattatatttcaaaatgtgcatacaatatgttctgatgcatttgaataattaacttctgtctccattacattattttgtgtgtggagctccagatttttctctcctaattattcattacatatgtaatagttcctcatgatctttgttcctcctagtgtttcatagtttgttgtaatgtcacttttactttttatttttggattatcagttgtccaacctttcattattggcatgtgctactccccttctcagtttatagtgcttattattataaatcctggccaacctttaaaaaatccatatatgaaagagagaaaatgtcatttgcattagaaaacaacttacaaactttcaaaacaaaagacatcatttagtcttgtacaaatggtcccatggaagagtccttgtttctaaaacatttgatacaggcattaaccaacagcactgatgtttggaacgcgaggaatccattcccagcataggagattggtggagaagaacatgaagccggtgtttgttcatgggaatctagaattcaagaaaaatactgacagagaaacatgaatgcatgtgtaaaaagtatacatatggtagctaaccttggatttagatgaaatcaccaaaggaaagtaactcaattttggctttgtattaggattgccaggagaaaatttaaatattgatgattgaattttatgcattcagatcattttcagaggagcattactgtgacaaggcaggagaggtgagaaagtgtatggttcatgattctttcagaatttcaggagtcttaaggtctagacatggaagaatcaccattttatggtgacctataaaggtgagaaggaatttgctccaaactcctcctgtcttttaattgacaaattcacagttgaacagattatttggtagtagggactacttggaggaaacaggtaacaggcattctactaaaggacctttgagttgtttccatctccctgtatactatccatcattacattgtggtccacgtcctcccactgtgatattctgcctcaccacacatagggcaaagagtggtggagccaagagacctctcaaataagaagagaaaggaaaattttcctgccttaagttggttttcttaggcgtttgtaggagatagaaaattgagtaacacattgcccttttacaccagatgagatagggcaggaaatatttttattccttatccttaagtcaacagtagaatagattattagaaatcaagccggaactgttttgttgacttctttgaagagagtaagataggtatgttttagagtttctagacaaatactggctttatggagttgccatatgatactacttggctagttagtcttaaattaattctctaagtataggggtaaggatactgatctcaccctcagaattaacaaattctggcttttgtcctgctgagacttgcctcccgctcgaagctcagttgcaagaaagattttgaagaactctgacacaatgctaagaaaagcattggaaaggtttttatctaaagactcagaggtacagggataaaattatgtaaaggtgatttgtagaaaagaaaagtctaagatgtcttgactcagactttctagtcaattttgctgcctctctcatgatccaagcatactgtagaagcacaagaatagaatcacccttgtctgtgatatgaaatgaccagaacagctcacacagttgtgaggttattaatgacctattaggtaaagataacacttagtgtattatatggaattttgcttgcattattaagtgttatgtgtaatttttagagtcaagcacaaggcatagtaggatacttgaaaaacctctaatttacaagcaaggaaaacatcttgggtgggcccatttagctaagcactggtgatagtggatgcttttatgttatgtccaataaaagggtaatttttattggtcccgccaaccttctacattctctacttctagggaatttgtcgtaaactaagatcttgtattgacatatgtaaaagttcagtttgggtacattttgctcttgtaagttacattatccctaaaagatgatattattttggtttatctcagctgtaaacaaagttacttgcaaagattagtaataactaataacaggtgtctatttataatcaatttggacactggatattgaaaagtagcactttccttcctctaacaatttctccatttcccatttttatagtttcttactcctctaatgactattacatttgtgtttaagtctctacggtacatatatttttagaaacagtggtcctcatttgatctccatcattaattgattttaccagatccatataaattaaatattccgcttccattgggagttaaacaaagaaagaatggagaaactaatggacagagaatcttgacttccccaactctcatcaactccattatcttttctttctccagtaaatcttttcctgagtgaataattttcagcatacattcaatcctaggttaaaataagcaagaatttgaaggtctgatcaatagaaaccttcagagatgtttgatggttttctttagtatgtgtcacgatgtgaatttttaccaaggcaattcttaccgttttcccaaacaggaaattactgtcaaagggaggagaacatagttcctgcgtgtttcaagacagcccataaggggaataggatagtcatagcaagatagtcatagctagatagtcatagcaagatagtcatagcaagacctgaagtcctaaaatttgattctcccccaaagagtgttggagaaagacaagaaaaaatacttagccttctaataaattttaaagatcatattgacagaaacagagataatcttcctagtgaactagcaacacgtgatatgcaccattgttaccaatataacttgaaaatgctacttttaatactgacattaatgatgcatatttgataaacagaattgatacccaaattataaagcattgctgtacatcaataaatttaatacaaaaaggagaagcctttatcaaattcttatttcagagtttgtggtcattttgatgattacgtttatgtcaatagtctcgccagtgttttctaatgcctgggtaacctcagctgagcaaattcacccctgactcgcaaatcttatctaatgctcttatgtactttcccagtttggtattgtggattctgtctccaaatccaccttttgattctgctccctgcttttcaatgagaacttttgatactctggctccagaaagcaagctacacctaatgttagggataaagaaaaatgagtatttccaagaaagtaagaattctgagtccacaaacagaagatttagataaattggagcataaaatatcagaacatactgttactctgttctcttttgtttttgagagtgggggagacagtctttttattatgtaactcgagctttcatggaactcactatatagaccaggatgggcctgctgcctcctgagtgctggggttaaaggcatgcaccaccattccagactaacttttcttcttattccctcccgcctgctaataatctttattgggtacaatttacaagcaataaaatgtaactttttcatggtgccttaggatttttgataaatgcctgctatcctagagccatcgctataatcaagacaggtaacatttcagtccttcacattcctactgtagtcctggccctgagggacactagtttgtgtcctctctctgtacttttggctttagaagttcattctgatgtagtattatgatacgttttcttcctgttgggtttctgtgactgagcataatgtttttgcacttcaaccatgctctcaaaatgtaccatttcctggctttattgaatctgctgcaatctccagtgtgacattgactagaaactgagcagtgctatcctagcctcatctctgctctaagaggcaaatcattcattaattcaatattaagtatgatacatataagaatttttattaggaaaattatatttgtgtgtgtagattattaggaaaaaagtcagttttttttttaacagtgctggagataaaacccaggactctatcactcagctatatttttcatactatggtgttttgagaaagagtctttctatgtatgacaggctggctttaactcatgagattcctgtttctgcctctggagcggtaggattgtaggtgaattccttcaccacctgcttggctatggtaagtgtgtgtgtgtgtgtgtgtgtgtgtgtgtgtgtgtgtgtgtgtgtgatgtatgtgtttgcacagatgagtgtatctgtgtatgaagggtgtgtgtgtatgtgtgattgtgaatttgcatgggtgtgtacatgtgtgtatgaaggatgggtatgcatgtgtgtgtacatgcgtggggaggtcagaggtagatgctgggtatcttctttgcttgtgcactgtgctccactttattctgtgaacaacaattttcactgaacctagaggtcactgattcagttagtctgtctggataatgagctccagggacctccctgtctctactttcccagttctggcattgtagacatttgacactatgcctgaattttacatggatgctagaggttcacacttggattctcatgattgctcaccaagcacttcgctgacagaaactaacacataagaattggacaaaagaagcaaacagtagaaaaagaacccaagagaggcccaagaaacagacacccatttgcacacccaggaatcccacaaaaacactaaactgaaagacatatttgcaaaagatctgatgcagactgatgtaggtaggccctgtgcttgctgctcactctctctgagttcatatgtgtgttgatcctgatggtttagagagccttgttttcttggtgttctccagccccactgcttttaaattctttatgtctcctcatcttctactggtttcctcaagggaggaatttgatggagacctctcttttacagtcaagtgttccaaggtctctcatttgcaagcttccaggtggcagaatttctgtggccatccatcttcttggagaagatacaggattctaccaagagctggcatatctatcacaaaaatattattgaatgacatatcctcagatctctaatgtcatttgaggatcagggtaaaattatctgttaggtatatctaaagttggcattaactttgagagcatatataaattaaatctggacatatagtttacctaatcatttatgatttaccaatgttagtaaaaacaagaagataagatatatattttcaaattggtctttgttagcttgaataggagagaccctttatcagactgtttaggtgtcataaaataggaatatctcagtctctagggttttactgtgacctgagacatagagcacaatcctaatctgtataaggcataaacaagttttaacattgtaagcaattcattgtttctataatcaattatcaagggaattttttatgctataaaatctggctgttcagcaacatacatccctgtacatgaattcatggagatatggctttaataactaggtaaaccagcattgttttaaattgcataatttataaaccttgtttttattacaggtcaggaattatcatgtacaaaaatatattggagatttcatgtctccttggtggggccagtccatgtggtcacccttactaaagaagtcagtgaagactccctttaacctcaaccaaaatgtccaggtggttgactgtaaattttgttggagattttttaaccatacccaatatcttagctgtttttgtttaataaggtagaacaccataaaataaacgtttctgtcatcatatcagattcagcaaagccaagattcaaaacacagggaacacacaaagtcagatatccagacaagtgtgtggtcatatattcatccatacacatgaaacagacaggacattaacagaaggatgaacagaaaaaaatcctgaaataggagtttactgtataagcagcatgtaataaaccataagaatgaaagatgtttcctggagatggtagtggaggcagtggcacctgatgctgctcctgtgagtcagccactataggcttgcatttcttatccctgtgcaagaggctgggcctcatgacctgcagccctcaagaaggcactgcaggggagaactgggaaacagtctgccggaaatccaaagaaagcccaggtgggaagctggaatagcaagtggagaatttgaaagaagagacatctgttcaactaccttcatagcagcattatttataatagccagaacctggaagcaacctaggtgctcctcaactaaagaatggatagagaaaatgtggtacatttacacaatggagtactactcagcagaaaaaaaaaaaacaatggaatcttgaaattcgcaggcaaatggatggaactagaagaaaccattctgagtgaggtaacccagtcacaaaaagacaaataagagataccatcaaagagggagccggtatagttttaaagtgaaatcaggcactagagaaatggccatagatctacaaggatgacaccaactaaccatctaagcaacattggagaggctatctaaaatgccctctcctgataatgagattgatgaataacttatatgccatcctagaaccttcatccagcagctaatggaagtagaagtggatacccacagctaaaaactgaactgtactggaatctagtttcagagaaggtggagtgattagcagaggggtcaagaccatgccattgaagcccacagaaacagctgacctgaacaagagagagctcttggcctctagactgatcactgggaaaccagcatggaactgatccagaccccaaaaatgtgggtgtcagtgaggaggccttggaaatatatagggccacttgtagtagatcagtatttatccctagcataggaatggactttttgatcccatttcacatagagggatactccctcagtctagacacacaggggagggcctaggccctatcccaaaggctatgacagaccctgaagacctcactctccctgggagcagaaatggtatgggataggtagggtgttagtggggggcagggaaggaaggaaaggagagggaactgggactgacatgtaaaactatcttgtttctaatttaaataaaaagtaaaaaaaaaaagaaagtaaactctatgtggtatttctttgatgcctgttatcttctaggaagtagattgatgctgccaggagcagacatgtctcattgtcataaaaagaatcctttgttatataaatatatttaaagccaccccccaagagtttcagcatggctagacctcactctgggaaagagagaggcagacagacagacaaacagaactggaaagggagaggaacaagagatctctgtttgtaaccctggctgaaggatttaggtaaatttttgcaggagataaccaaagggtttctacagaccaaacttggactcagcaagtacccattcacaagtgcctttcaaggaccaacaaggagaaaaggtgagagatggaaatacatgtgagttgtcagtaagagccattgaaatggtaattatattttccaatatatgtatgtatgtgtttatgcatgtatttatatgtataaaataacatttggagagaaggggccaataatatgaggtctggggacatggaaggatttggagggaggagatttggaagtggctggagcgaggaaggacaaactagacactaaaattaaatgttttttacaaaggcagtttgaattattcttctagaattaagtgacaggatttgggtgaaagaaaagcatttcaaaataatttatgcaaaactaaccctccaaaccataaaaataattgcaataatgattgaatttagtgaaaaaagaactgtaaattgtctatgaaaagatatgagggtatggtcacataaaacatgatagctagatatacatggtccccgggagaagaggaaagggacaagatctcctgagcaaactgggggaagagggtggagagggggagggaaatatgaagaaggggaggggggagaacatgagaggtcaggaagatagagtcaggggaagaatagagaaggagagtaagaaaagagataacttaatagaaggagccattatagttctaaagagaaacctggcactagggaaatatccaggaatccacaaggatgaccctaactaagaatctaagcaatcgtgcccttctcctataatgagattgatgactgccttaaatgctatcttagagccttcgcccagtagctgatggaagcaaaagcagagatccacagctaagcactgagtggaactcctggtatccagttgtagagatgagcaaaggagtcaagaccatgttgaggaagcacgcagaaacagctgacctgagcaagtgggagcgcactgagccagtctgacagctggggaaccagtacaggactgaaccaggacccctgaacgtgggtgtcagttgggaggctagggcaatatatggggcctctagcagtggaaccagtattaatccctagtgcacaggctttgggagcccattccctatggaggaatgactctcttagtctagatgcatggggtatggcctaggtcctgctgcaaataatgtgacagactttgatgatcccccatgaaagtcctcctccctccccccttgggagtgaatgggaggtgggatgggagatcagtggggggcatgggaggatgggagggagagggaacagagattggtgtgtaaaataagattgtttttaatttaaataaatttaatcaaagctattgctttcatttcagttggctatttagatctagttaaggggatgctttcctgggaactctcagctttcttactcttttcctctgaagtcgctctttccccatccacattgaataccttaacctttgcaaacctgagatgataaactggcctttacatagattgcacccaaaagtggtttaagttttatcgtcatcaatacataaattattcagaggaatgaggttctgggtgttgccctactgagaacgggagaaaattcgtttcaagggggatggtgccaagattgccaagttgttaaccacacatttttgtcttacaagcagacacaattcctaagaatcacagtcttctgaattgttactgtataactgtagtgtcctaataatgtggaagcctcagatagtagaatcaactggtctcatgtcatctgccagtgcaaagtgaaccaggatgagtccaaattaatgtcacaatagaaacatggagaaaatttcaaataaaaatccaaacacataatgtcataccaggctatccagaagtgcaaacaagctgggagagttccatcaaataaaatctcagttttcctgccatatagctttgcaatcattcagcaaacaattccatagagccttcaagatgacaatcacctcaaatgtacctggtttctctcaggagaaactggtatcagaaacacataagtaatacgttccatagaagtttcaatttcttgcatagccaattctcccagggaatcactgtaaattttattcttatttaacatcacctttcataagaattattacatcgtgccaccatttgccttcactgaggggccttagcagcaaggaattcaaacattgaacatgtcaaagacataggcaagagttgtacagcaaattccacttaggacagtgaaggatctgtccaagtcttcagagctctgtgatctttgtcaagcagctactctaagactcttggccttgcaatctttcctctgtattttttgaaacttcttagattaaaaaatatacaatgtacttaaaaatttcaatgtacaattattaactctttatatctaaaaccatccttaaataaatgcaaaggtacagctccaggatttctgaagacacaaaagcctacaaatgtacaaatcttcctctaaaactggaagaatatttgcctaggacttattcacatcttccaatggacaaaagagtgatgagctctgttatgtaactatttctggcaaaatgccactcattgtgtgattttgtgtaactatgtccttgaggtaagaaggccaaatacaattgttaaaacacagtgatggttaaacataaatttaaggactaactctgttctttctagtctaaacatcctaaataaaaccaaatataagaatggaaaagaaataaccaaacagaattaatcaaaagggaaactgcagctatactaattggcagcaatgtagaatgtaggacatagaatattgagagaaaaatcaaagaattacataacaggaccacttcattaatagtttataagatcctaaatatatatttacttaaagctccacaacacatggagaaaaatttggtagaattgtcaggagaaatacacaaatctacaattacattcatagatcttgattttcctctattgataatttgtatcagagatagaaaatcagtaaagatacagattttgatgatggttttggataacataaacttataagcattaaagaatactccatctagaaacataagatctttcttagttttctattgatgtgaagaaactccatggccaagacaatttataaaagaaagcatttaatttgggactcacagttccagaggacagtagaatctgtgaccatcatggtggagatcatgtcagcaggcagacaggcactcatggtgctggagcagtagctcagaacttaatgttgaaacaataaccacaagcagagaaagagagccaattagaatggcatgagcttttggaaagttaaagcacactctcagtaatgtacttccttcaaaaagcccacatcttctagttcttctcaatcaacgagggaccaagcattcaaatataggagcctatggggtccattctcatccatactagcacaaaaatctttaaaataatgattatacattgttccagggaggaagatgtgtaataaccatgcagagaccacaacatttcttggtaacaaactgatatagttggagagcagatacattataagttggatacaagcagaacattggttttcatagcacataaagaaagtgaagtttggtcccctggagtctccagagttgtaagtctaaggttcatgagtttccacaagcttggttcagctgtctctgtcccttgctcatatgttccctccttcctctcttcacctggattcccagagctccgtctgattcttggtggtggatctctgtgtctggttccatcaattcctgggttcagggctctttgatgataattggggtattcattaatctgattacagggtaggcatcctctctactattggtaggagtcttagttggggtcctccttgtgatttttgggagttaccctggcacgaagttcctccctaagaccatggtggctctctctattaacatacctttttattgctcttccactgcatccctccccatctaggccatctagttctctcctgttctcaccccttcctgccttcttaccacccccaaaccatgtcctccatatgtgggagacaagtctgaagcttgaacgatcagaggggcccccggcagtaggaccacaatacaaacccagtgcatgagctagcttgtcagggcccattcccacgatgggatgccatgctcagtcttaatgcataggggaagggcctggccctgcaccaacctattatgaaagactatgttgactccccatgggagcccttacctgtgaggaggagtggactgggagtaggtgaggggagaggttagggagggtaggaggaggggagagggatggaagggagaactgtggttggaatgtaaagtgaaataaaaaaaatttaaaaatgggggggagcagcaacaactaaaaaagggaaaaagtgaagtttagaagcagaagagaggaagagaatccagaatccattaaaggtctggcaggggtggggtgtggaggtggttgtggggttgtagttgtgggagtaggggtggggtagtagtgatagttacagttcagcccttgcagtacaattcactgttctcactgtggactgtgtacagtcgcagaatgttggaactctgcttacctcagagagagagcctgaagaaatttgcactctattttcaatggaaataagtaaaaaggaaacggagaggagaggagcagatgggaggggaggggaaggaaagagaggaaaggaggaggaaagaagaggcatcctttgctagcataagagatcaaactgtatgaggacagagactcaaagtcacaagtaacagtggatgcatctctgagctgatgagcaattaaccagttaggaaccttgggatcatatatcatattgccacctcttcttatcattaaactgtattcaacaacatggcattttggatgcctctagataaagaatacttgtgattaattttaaagttacaaatctagtttgagccttaaacttaagaggactattaatgggcaaatcttttatctgtccccaatcagccttcttccctttacttttgtgtttcccctttaaatgtgtcaattctatttacttgatcagccttatcctacctagttctgcttctctgaattaaaaatgtttctgattttcttttactagagataatcttcccaaagaacataataggactaaactagatgtgtactgattctctggtggcatttctttgcctctttttcttttcattgtacctataactgaaattgcccttgtagattcattgcctttcttgttcttatcttctgtttgcttctcctcttctattttttcagtgtctctactactagttattagtcttcttgtttctttatgctttttgcattgatgctcttactaactcaactctctgtgcatatcatgctactattaattttttctcccaagactgtttgggctgaaagggcactgtttttaattggctggtactatatttccatgagtgaggtaacccaatcacaaaagacaaacatggtatgcattcactcatatggattttacacatagagcaaaggattaccagcctacaatccatgccagtagagaagttaggcaacaaggaggactctaagagagatatacatggtcaacccagagaagggaaaagggacaagatctcctgagcaaattgggagcatggtggagggaagaagaaactaggagaatgagaaggggagaagaggtggggtgaggaggtcataagggggcaagaagattgtgtagggggaagaatagaggagagcaaaataaggataccatcagagagggagccagtatcggtttaaagagaaatcaggactagggaaatgtctagagatctacaaggatgacaccaaataaccatctaagacacagtggagaagctaccttaaatgtcatcccctgataatgagattgatgagtaacttatacaccatcctagatccttcatccagcagctgatggaagtagaagcagacacccacagctaaacaccgaaatgaactggaatttagtttcagagaaggaggagtgatgagcaaatggatcaagacaaagctggtgaaacccacagaaacagctgacctgaacaagggggagctcttggcccccagactgatcactgggaaaccagcatggaactgatccagaccccatgaatgtggatgtcagtgtggaggcctcagaaatctatggggcctcttgtagatcagtacttatccctagcataggagtggactttgggatcccatttcacataaaggcatactccctcagcctagacacatggggggaaggcctaggccctatcccaaaggctatgacaaacccttaagacccctcatggaagacctcactctccctggggagcagaattgatatggtataggtagggtgttagtgggggggcaagtgaggaggggagggaaagggacctgggattgacatgtaaagcaatcttgtttctaatataaataaaaaatggagaaaaaaggaaaaaaaaaccctttcctttcatagttgcttttgatcatgatattatcccacaaaaatagaaaccccaacttatgacataatgactgttaacaaaaagtaggccatacagaaacagctgacctaaaaaggggggatctcagggaccccagactgatagctgggaaaccagcataggaccaacccagaccccctaaatgtgggtgtccattaggagacctagccaatctatggggcctctggtaatggatcagtattcattgctagtgtacaaatggactttgggagcccattccacatagagggatactctctcagcctagacacatgggggagggcctaggccctgttccaaatgatgtgacagactttgaagataccccatggaaggcctcatcctccctggggagcaaaaaggggatgcgataggatgttggtgggggacagggaaggacgggagggagaaggaactgggattaacatgtaaaacatgattatttctaatttaaataaaagagaaaaataggccatggccaaaaacccctgaagtcctttcctccaattacgctctgcctcctaaaggctctgttaactctccaaacagtgccagcatctggggaccatgtgctaacaatcatgagcttatggaggacacagacaataaaactttgatctattaccacaattatctgtgtaaagaaagggatggtaacagtgaagtaatatatgatcctcttcaaataatatttagtgactcagtatggctccctggaagtatgatgtgtgttgatgaaaagactcaggaaatacacttatgtttgaagtgtatttctactttaggtaaagcatgacttcctttagaaatttaagaacttttcttaaaattaattttaattaattaattaattaattagtttctccattcattcctctccttctagcaccaccctctgttcctggccccaatcaactcctcctccatttctgtctagggcttccactgaatatcaacaaaacatggcgtaacaagttgtattgagactgggcaagaagacccagtatgaggagtagggtcccaaatgccggtaaaagagtgagagatgatagcacctgttcccacttttaggagtcccacaaaaggatcaagctatacaactataacaaagatgctaaggtccatcccatgcagtctccctggttgtcagttcagtctctatgatcccctatgagccctggttaattgattgactgagttttcttgtgctgtccttgacaactctggctcctacaatcacttctcttcttctgcatgattccttgagttttgcctaatgtttgactgtgggtctgtatctgtttccatcagttgctggataaagcctctccaatgacaatttgggtaggtaccaacctgcgaatattgcagaatatcactaggcatcattaaattgacacctttttctgtcagtcatgtagaatctttattacaaggtgagatatatatgtagtaagttttcttatcttgatgataaataatctgtcagaataaatttaagtgaagaaaggtttgttttggagcatagtttcagagaatgaatccattgtgatagagaaccacagcaatttgtgttgttcaataattttaatgacacatgcattatttacagtgtcatgtgaggttatccgatgtgtatttgtaagagctatggaaaactgtctctttcaagtcagactaagtcaagatgtctgaaactagccatgaaatacaaaatgtgtacaaactaaaaggctaggttctttccagtggaataagacacatgatactgaaaggtcacatcagacatactgaaaattatgtaaacacacgatgttctgaaccacacaacagaatactatttattctagcttttggatctactccacaaggataatcatgcataatatttcctgtaagctattattgcctgaagctacaagtgtctcacaaatatcctgttgagaattggcaaacatctttgaggtgataaaagaagaagccttatttttaatgtcccttgaaacttaaaaaaattgccacctaaaattgagcattcttatgcgataattcagcattgtaatggcataatggcacatcacagtggcaaacagtactgtggtgacagaatttagagttgtgatgttacaacgtgggatttagagcttacagtgcaaagttaattatggtggtatggtggaacattgtgagaaaaatgaaacaccaatgccagtcaggctgcaagattctcaccatcaccatgaattggcttacctctgtcccccacctactccttacatcctctgctcggacctgtcttccagggaggatggctcctaatgcttttcagatttggtttattggtcataaattcatagttcatgtttatcataaagtttttctttcttcttcaattatgaatagcatgttgcatacaaaaaatctgggctggcagctgtcttccagagcttggaagcctttctggatggtagaatctccattgagaaatgactggctaggctggtatgtttcccttatatgccactctgtgctcctcccttacaattttcaatataattcatttgttcagcatgtcttaatataacataatctcaggaagttcatttttgttcttgtttgtctgatattctaaatgtctcctgatgctgtatggtcatctctttccctatgtttaggaaaatttatcatatgacttgatttggtttttccctgtaccttttgcttatatttattattcttatgttcctttggtattagaagcaatcatttctcttttttgatttttaaaatttaaattataaactagattcttttacatgtcaatcctagttgcctctccctcctcccctgcctgccaccaacctcctaacccaacccctttctgatcaccagggatgctgaggtcttccataggggatctttagagtctgtcatatcatttggagtagagtctaggccctcccccttgtgtctaggctgagagagtaaccctctatgtggagtggtagatgcagtcatttcatggtatcctgtagatcccatgtgttctatttttactttattaatttatcttcattctgtttcaatgttctaattcacatatgttatcttcaagtcctggtactctaccataactttataattctattgttgaagcgtttaattgaggttttctgagaccttctaaatattttattttccatatttctttttgccatggtttgacagtttatttgccatgggcatttgtgtctccactgagaacttgctcaatttggactaaattattgtatgtattttcttttttatttgaattagaaacaggagtgttttatatgacaaccccagttcccttctcccacccatcctcccctaccccctcaactaaaaccctatctatcacatatcctttctgctccccctggatggtgaggccttccatagggtgttatcagagtctgttgtatcctttgggatagggcctaggcccacccctgtgtgtcttggctcagggagtattcctctatatggaatgggctcccaaagtccacacctatgttagtgataagtactgaacttctacaggaggtcctgtagatttctgaggtttcctcagagaaaaccatgttcctggggtctgggtcagtcccatgctggtattccagctatcagtctggggagcaagagttcccggatgttcaggtcagctgtttctgtggatttcaccagcctggtctggccccctgtgttcttcactcgtccttctctgcatctgggttccagttcagttcggagattagttgtgggtgactgcttttacatccagcagctgctggatgagggctataggatggcatataagtcagtcatcaatctcataatcaggggagggcatttaaggtagcctctcctccattgcttagattatttcagtggtggtattcaagtgggactagactgtatgtagtagggttgaggtgttttctctctcaattagaataggaataagtatcagtagtctgaacctgccagagtactaactatattctgagcactgcccttgtttctccataaaagatacaatactatagaaccagtcataaacaatgctcaggttccctgtaaagatactgtaagagttaattaaaaacaattgcctttgaacactgaaaaagtcttggttgccaaggagtgtaggtagcattgactattctaagattttagttactgatggcatgaattgaaagggaataagcaaagtaagattagtggttagtattggggtgacagagaagaagtaaaagaaaatcattaaaaatggtgaacaaaaaagacaaagaaagttataatgaaattcttgctaaagctagaatgaacaaagataaggaaatgccatcaggcaacctataaaaactctaatcctcagcaggctgagcctgcaaaactttcaatcaactaaaagccagcttgtgctctctggaaaaaaaaaacacaggtgtgtatgcatacttggatcccatgaaggatgtcccaggggcttgaacattaagcatattttcaccccatgatggagcgttcagagtcagaactgacaccaatgatatgacatttcctaggactacccagagggaaatatgaatcagcatccaggccaaagactcacaatcttctctctctctctctctctctctctctctctctctctctctctctctctctctctctctctctctctctccctctctctccctctctctctcctctctctctctcctctctctctctctctctctctctctctctctctctctctctctctctcatctctctctctctctctcacacacacacacatacaaacacacatacacaaacacacacacacgatttctccacccagctcttttctctttcatgttgagattattattattatcattattactattattattactattagtattagtagtgtgtgtgtgtgtgtgtgtgcgcgtgtgctcaagagcactctgacttatatgcagaggttagaggacagctctgtggagtctgctctccttccacacaggtatgaattttaggatttttacttgggccaccatgcttgcacatttgggtgacaagtgtctttaccactcacgtcctttctctcttcctttttatacttctcttgtttaatatctaatgtcacgttaatagaccagctttgtcctactctcccatcttctctttcctcttactccttctttttctcccctttccctcccccctttaaaatacccactactaaaagtgcaatacggagtttttttattcttctgtcttagtctatggctacagcctgcagcagttgccttttactggaaggagagcactcctcaatcagagaggagtcctttctaatagattatgggctctctctctgttctgctctgcaaaaatagatattgctttactaatgaaagccagtgtttcttcctctcaggtatcacttggatgctggcttttaaactgataatgatatttgttattatactattctcctgttactgtagcaatctgtgcatagatattgtatattccattaggaaaactctttgttggatattcttatgcatgccattttttttgttctgctataacaaaaacataaaattgcgtacattataaaaagagtgtcattcatttcccttttatggagattttagaccaagacagatgtgtggctattgtccgtgcataattctggatgctacaacaaaggaggagaagatatgccatggtgacccaagaaacaagagttggggacagggcaagcagggatttttgttgctgttcattttttttaaatattttttattagttcaaattagtaacaagtttgcttcacatgtcaatcccttctccctctccctcccctcccccacccctaccccctaccccatccaccctccactccccaggcaggataggcccttgactggggctccccaaagtccaccacatcatcctgggccaggcctaggccctcccccatgtgtccaggccgagagtgcatcccttcacgtgggatgggctcccaaagtcccttcttacaccagggaaaaatactaatccactatcaggggccccctacagtgcggaggcctcctcattgacatccatgttcaggggtctggatcagtcctgtactggcctcccagacagcagtctggggtccatgtattcccccttgtacaggccttgatgttcatttttatttaatttaatttaatttaatttttttattttggtttttcgagacagggtttctctgtgtagctttggagcctatcctggcacttgctctggagaccaggatggcctcgaactcacagaaattcacctgcttctgtctttcgagtgttgagattaaaggcgtgcaccaacaacgcccggctgctgttcatttttaaaataaacttatgaaaagaagtccctttattcaggcctgagccatgccaatgatacagtattaatccatatattggtgcagtcagaaaatgttcatgaaggctcacctctaacaattctgccaccgcagcactgttaactcaggacacctggcttccaacacgtgcacctttgggacataaatcacaccttgtgtgtgtgattggttattttgtggggtgtaaaggagtagaaatacataggtaattctatttaattaccaaagagattatttaaatttattcttctataaggaatatgaagtgtgttagtatttgtgataagatttgctgttgctgttctttattttttgctattgagataagatttttttcctaatgaattcaaggatgtttcagttcctttttggctatgaatgccttgttatttctgtgttctgaagttatcatttcccagttttcatcaggtttttgtgcttgttcagttacagaaaaactgtgtgtataacctcattctggaggctggagagaacactcagtggtttagagtacttcctgctcttgtttagagcttgggattggttccctgcacccagatagtggctcacaattacctgtatttccagtttcccgggatccaatgcactcttccagcctccaagggcaccgcacacaggcgatgcacttacatacatgcagaaaaaacactcatacacaaaatagaagtaaatctttaaaactaactcttcacatttgcaaggtttgaaatggttcatttgactatttcacttaatgtgtgtttgtgtgtgtgtgtgtgtgtgtgtgtgtgtgtctgtctgtctgtctgtatgcatgtatgtctgtctatgttgccacagcatgtctatagaggtcagatgataactttttagagttgagtctctctttctactatgtggtctctggggatcaaagtcaggccatcaagcctgaccacaagtgtccttttcactggatgaggcttaactctagcttcatagttcacacagttactttgttacagcaaacttcaaatttttctcataaaactgattacctatgatgctttgacacaggacaaacttccatatttatgacttaaacacacatactgatgagatgtattattttctgacctaaaagggaaaaaggtacttacaaagaacaccatgggaaccatgattttgagattaaggattttagcaggcaatttagcagtggaatgaaactaaaaagttgttttggaaccatttccatctggagagctttgcaatgtttaacttctttatcagacttcactacaaaggtagcccctgctcccttttttaaaaaaaaaagacaaatatttacaagaagtgggaatgcaaagagaaataaaacaatttatccaccagaatacatgtggtgacagggtcgtattctgttatcacaaagcttttgatttcaaatcataattaacatttataagtgaagtttaattgtgtcttggatgaaggccaacttcctgctgaaacccacaggcttgattcttttgcacagaaagatattaagctgaagtgtgtcctttgctctgctcctttgggtcttaagagtaaagagcttggaaaagcagtagaacagagaagaacaatccaacctctaagttttgatagaatttgtaattattgttctgatgatatcatcagagatctgtttctttcttaatgtctaaactgtgaggttagggtttgttgttgttattgttcatatttatgcagtcatttacacattaatctttatgtcacaaaatatccttatttctgtatatttgtcttttccttctcatagtgttgaactctttatttaaaacaatacaacttataaatttagaaattaaaaacatccagtaaggtagactatagagttgtctcggggattaagagcacttacccagggttcccttcccagcccccatatcactacagttccaagacaccctcttctggtctctgctctctggtggcaactgaacttacatatatgcacataattaaaagaactctttttaaaaaccagtaaagaagtgcatgtttattcagagggggacgggaagtaaaagaagagaattcttttaccctaaagaatatggaataagtcaggcagttggaaactacccacaggccagcttaggtctttaaggcccaggctggcaggaagacattcactggccctcttggcaccttcctgttcccgacagtggatgagcaaacgtgtggtggagaaagagaagtgtaacagtttatgtgctgtggaaaggggaagaatggaagaggtgaaggttgttagtattcaggcatctgtactgatctgtccttggggttctgacaggatacgccctcagctgcagccactaagagcaccacctgtgcacattcactatgtttccctttaaaggagccctgcccctctctcttttttctctccctctctctgtctctgtctgttcctttctctctcacacacactctctctctcatggccatggggcagctgtaaataaattagctcatagactagagccaataatccaatcccaagttttcagtacactgtctttagtcttgagatctacttatcagggttatcagggatagcactgattctcatgattaactcaagcactctgttcagattattaattttagttaaatgtaaatcttacaatggaatgaccaaagcttgcaaaataaactacaaaaattcccacatacatcattccccttcccccatcctgctttccagacatgactgaggacagtagtagtgagtagcacagggtactcttctaggatagtatcttgataacccttccagaataatccaagtggcagcagaaatattaggaaaagccatgcaaatctgcagttcttagttcatactaaataggacaaacaaggctcacattaatgtcccaggagttcatttactgcctagtgcaaggtatgtatatttgtagaaaaaaaataaactgttaaacaaaattctaatgatatgttcattgtgaagttagtgaaaaacaggaccaagccagtatagctggaagagcagatattctgaagttttgtcttgaagaaatattaccacaaattagaccaaaatttgaataattttgtggtgtgtggccattccagctgcttttgtacacttggggatgtttctggtacctgcctggctgcaatttcaagacaatgaatataaactttgtgccttttcagtaggtggctttcttttttccccactgctattagaggagttaaccttcaaggccttctcccagagctgtagatttttacagaggtgcccccctcttcattctactctcttccacacaacagtgccatgtgatggaagataaaatttgtagctacttcctttggctaatgaaaatgaatgtattctttccatcaactaactactaaggttctacatttgaaagttttgttatgaataggacataataatatgaattattatgctttctgttgtattgtaaaaataaaattttacctaatatttaatacctggtacatagaaaatttcttttcaaatttagatttcaaaattattatttataagcagtattattagtgattagctttagtcagtatctcatagagatgttcacaaatgctactcttgccttgttttatgtctttcatgaaatccaatcattagattcacacttacattaagctctattcccatgatcacttcaatatcatttttcttaaaataatagtgtactctcacctcattgatggctttatgccaaagcatagcgggtatactaacataccatacaactgggaactttttcccctatcacagtgtcttgagctacctttgtgttaagtgaagtagacagagcatttcattttatgcgtcttgaacctttgtgggagaacatgaatacctttttactcaccatgagtcacaccacccatttttcctacttcagttttcatcctgatgttttcttctctcctgtgcatatatgtacatgtatgtaaataaccagattggcaggatgatttctcacacatttgtaaaagaatgactctaaaacccacctgcttgtttccatgcatctgtgaagatcttaatctttggtccaaaagacaatgttaaaaaaaaataacagcaaagcacaaaaattaatcatccttgtattaaactgctttctaatattctatgaaaatactcttataaaaatgtttttcttaatactcaagtatttcatatatacaataaaatattaacttatccaccccaattcctcttccaactactctcatatttcaccaacatttttcttctcccaacttcatgtcttcttttattataaatctgtcaagtccatactaaattcagttagtaatgcccatttggcatgggttagagatatccattggagcatcaggatcctgtctatagccatatcctcaaaacaataatttttaccacagaaactattaaagttgagtttttgctggtgttaccctgtgcatgcgtaaggaagacaaccagagcatctttagaccattagccatgtcatgttcagaagagagctttgggagcactcctccccatcctctggaccccacaacagtcacatcaatattgcaccagagagcatatctcgtcttgcaggacagtattgtagcatacagggctcagggctgggtaagaacattgatgtctgttctttcctatctgcctgcaaagctctatctgacaccatgaaagctaggtaggatgggagaaattttctacatgtgaggttgctttctttatgtcctgcagtcagagtgattggtgctctcagcaataaggtcttaacatgagttatgggtgtaaccaagggcaatggcaacaccctgtgatgtttgggtgatctctgggccctcctagaccaataacttgtaggaacaggcatcatgatctgcagtgtgagaaaaattcattcttcagaatatctgaaggccattcagagataaagtgaaattctctttctctctctctctctctctctctctctctctctctctgtgtgtgtgtgtgtgtgtgtgtgtgtgtgtgtgtgtgtgtgtgtaagttttggtgtataagaagtttttagtacctttttatgccaccctggaaatgataatgacatttttagatcaaattgtactattaccatctgtgtgagtaactatgtcagttctccacctccccattgtcccttttctgggatgacctgctggcaaccacatgattacaccctttcttatgcagaagaattttctattgttacaggagaggagtgttcatagctttgaccaggagtttatttggtgaagaaccgttgtttagcagcagtctgacattctaaggtggacatagatctcaggagtgctcccttagaataaaaatgaatggcctcatgagctctcagaaggagaaagaggaaagcccatgacacaaaatcaaagctatttgtctgcatataataggctttttgaatgggtgaagaccactaataccctttaatttttacattttaactgtttgaggagtatgcagattagtgatgaactctcagtcactaataatgtgatgctgttgcattaaggaaaaaaaataagagcattcacctactgcccacttccctgcttgtagttgtttaaccaattgagtgtagacttgaattctctacttcacgcttcctgcatcttctgtcctttgtctattataagaatcagaatgtgttaatgttattgtttccatgtgtgattatgtatgtctctgcatttctgtctgctgtatggctgtatgtctggtgttctgtgtctgtccctaacaaagaccttctctgtatttattgaacagcacagaaggcatcatacagaaaaaaaatgacatacttcatataaattgctaacagaattttataagggattaagtcactgactcaaacaatactacaaatatcattgttcatcaaccaaccataaatagatagttttagaagactgtttctgtatttgctgctttcagcagatgatatgcatgcatgcattgctctgggtcaggggcatgcaagagtacataatttaagattacaactgtgtattagtttaggtcatgaaagttaattacatgggaattctaaggcaaataaggttagttgttatattgctctattaaaaaacaggttaagggggacccttagaggaacactgtaggggaagctgtagccacgccttcttaggggctggctacaggtgtgcctgactaggcttgtgagggcatggtcagagtgacatagtgggactgcgttttcggtttcggtttctctttgcttcttgctgtacagacctctaccacgccggctggctaggttgctctgtaagtaaggcttttccctattaaatacccttatatttctacctgactccgtattggtaatttcccactatagaacacacatggagggccctgggaagggaaatagttgatatcgcctaggtaaactgagagggggagtagaaaggagggatgggggatgcaagcatgaggaatcagaaagaccaagttgggggagggatggaaggggagattaatgaaagagatgtctcaatagagggagccataatagggttagggagaaaaccagtgctagagaaattctcaggaatccacaagcatgaccctacatgaccccagctaggactcctagccataatggagagggtgtctgaatgggcctttccctttaatcacattaataactgccctaattgtcatcataggacatgtatccagtaactgatggaagcagatgcagtgacccacagccaagcactgggctgagctcctgcagttaagttgaagaaagggagggatcatatgaacaagggaggtcaagaccatgatggggaaaaccacagagacagctgacctaaactagtgggagcttacgggctatggactgacagttggggaacctgcatgggactgaattagaccctctgaatgtgggtgacagttatgtgactttatcttttggggggtggtactggcagtggcaccaggaactaacccagaggcgtaaactttctttttgacagcccatttcctacggtgggttaccttgctcaaccttgatacagggggaggggcttgatcctacttcaacttcatatgccagactttgctgaccccccaaagaaggccttaccccctctgaggagtggataggagtgggaatggaggaacaggagggaggagaaggggaatgagggggaactggggttggtatataaaatgaagaataatttttaaaaaataaatgtttaaataaataaaaaaaccaggttaaacaaatgggctgagtacacaatggactaacagtcttaagtaatcgcacgtgtattattaactacagctgtgaggttcatcaaagcttccagtctcttagaatgttagaggaattttctaatactgcatcaccacaaaggagttttctttgcctagaaaactctaacatcacagatatggccacatccatagtgcttttgttaggctaatctacctagattatggcctcagataactatatagagatctacaagtaagttaaatacaatctcttgttaacttgatatctgaaaaggaacccagtctttgtccacatagaaatcacaagccacgatactgagattcctagaagtagtgtatagtacgaataacaaaaacccagatattgagattggggttcaaacttcaagatgaagatcagagaagcaaagcagccaagccagtagctcttacctctacctcagactgaaaggatgatctggctagctacatgaatcctcagaaacaagtgctctccctatctggaaactaaatttccatcatgaaaccctttgcttcttacttttataactctctttgcccagccatttcactcctgtctctacctccctagtgctgggattaaatgcatgtgatcccaagtgctgagataatctttgtgtgacctgtttctcttttagactggatcaatttcatgtagctcagtgtggcttctgaacaaaaagatccgtctacctgtctcctggattgtgggattaaaggtgtgtgtcatcactgcctggctctgtggcttgtgactaggtttgcattctgtaccctcaagcaagctttaataaatcataaataatattgcaccacaatagtgtcatttgaatagggctatgtaatgttcaaatagtttttccagagatcgttttgaaaggtcttggatttgtacacagtattccagaagaccttgataatttgggaggttataaaccttgggaaccataagcattcctggttggatacccatagtgggcctcttctctttcttcttctctcttcctctcttctttctctgcccctcccctcttgtttcttgatatcccaagatgttaaaaggccaggccacatcacctggtttgtccagctccaaatggaatccttttctgcctgacaaagaacataaacttcaacaattcactcctcagttgttctaattatgtagtactctcatcatagtctgaagcattggctcttgttgatacagttttttttctataactatcttagactttcatcattgtggcacatacgagagagacacagggtttatttcaactcatgatttgagaggctttatagtttatggtccacaggcccttgtttcagggtagtggtgaggcagtaagttagacaactgagtaggagcaagagagatagagacagagagagagacagagacagagagatagacagagagagaggaggtaagatataaccctcaatgtcacaatgaaatgacctattacctacaatgaaatctattatctaaaattcgccagacttcccaaaatgattccacattttcagaaccaagcattcattattttatcctgtgggaaacatttcaaatttaagcagtgagaatatttcctactataatgtatattgcagagttcatccctgttgtacataaaatgatagtataaaataggacccaaagtgtttggggtctagatgaatgaagctgaaggatgaatgaatgagagagtgaatgaattagtcatttaaccatagtaatgagttactatatgggccaagattaactcattcacaaaacacggggtgaaacacagatgtcattgttgtttcctgttgtatagagtgagccagacttccgaagtatgaatctcttttgaattatgaggtgtatgcatacatttgagtgtgtgtgttgtgtgtgtgtgtgtgtgtgtgtgtgtgtgtgtgtgtgtgtgtgtgtgtgtgtgtgtaatatgtatatgtttttggctacatgctattaaaacttctcagactataagggactttttctaacaatggtgcctctattttgcccctttaactctcaatctttagtctggtaaaatttttctacatactctggatggggattactttttgttacatcaacattgcaaaaatttattgaccagccttacaaaaatattttctgtgtctttttgtgtggaaaaggagggaactattcacatgattaacaaatactactccagtgagctgtgtcacagccccatctagtgtcttcattcagaaatatcagtaaacacacatttgaacacttcgtgagattgttatttggaattgattgatgggtcttttgtcacgatttgttttttttttttttattttagagaagcaactggctccagataaaattactttaaaattatagaataattagttttgtaaaacatattcttcagagtagtttagggaaaagagttaaagtaaatgaagttcaactttggacagagaaagacttggagagatgcagacatattagctattagagcaaatggtgagaaagaacatagacagcccctggggttctgtagtcctgcagaggccacagaggaagagggagtaggtaaaattgtgaaaagagatgtgaaacaatgtacacacacacacacacacacacacacacacacacacacacacacacacactgcggaccctatgaagaggcctttctgtcctgagttcagtagcatacgacttcaggtcccctgtttggacatcagagctgccaatctaaagaaagcaatttccattccactctaattttgtaggtcatgtcatgagtgagaattctgtggtttgagtgagaaatgtctccaacagtgttgtgtttaagcagttagtctccagtcaatgatgcttttgtgggaagtcatagaacctttaagaggtacagccttgctggaggaggtatgtcactgggggaagggctttgagagttgttgccttttcccacttctagcttgctctctctgctttccacacgtggataaagatgtaggacagaactaggccctctgtatgtgggagatggttgtgaagtgttggctatctgaggagcccctggcagtaggaccaggatctatccctggtgtaggagctagcttgttggaacccattctctttgagggcatgccattctcagtcttaatgcaatttaatgtgccagactttgttgactcccataggagcccttacctgttgggaggagtgaatggaggagtgatttggggctgaggctgggggatgggaggaaggttgagaaggagaactttggctggaatgtaaaatgaaataaaaagctgtgatgtctcaggttgcttgctctgggaaaccagtatgtatttgcatcatccttgttcttgttcaacaaacacagaaactaggaaatgctatgtagtattccaataaatagacataacaacagaatttcatagactcatcaaaattatttttattagatgttcactgtatagttgctggaattctattggatccttgttatctgcttcattatgaattccccatacagaaaaaaagacaaaaaattggtgtcttctttcacatttcatttcccctactttccctgtacactttactagacactcatctctaccaccctcggtattcactagactcctctagtggtgaaacttaagaactggggtaatttcctgtgcttcttcaggaacacttcagggataattaaaatagtcaaactgaggaaagtaatttatatcttttctgggcctttgagttctctaaaaattagagagcattatgttttatacaaaattatgacatttactgacccaaacaagtatggttattttcccaacatcacccttgtctataaggatgcctgcttcgagattactatatacatggtaaatatgaatagctgtcaataaaatggatattgatcaagtgtcacaaattagcaatgcaaattctaaatgactagatccttggtgctcagggaggtgtctctggacttaggtcagacagatgatcagaacaatgtaacatggaagttatgctggaatgagagctccactagacagctccatccacctcaatagaattttcatgttataagtttccccttcatattaactttgtgaacaaaaaagatttccaatatcttccatagcaactatgtcctttccttaggtgtacagttgttactgatagcaattctcgctataagtgatatagtgtagaggttaaaaaaataacaggcatgtagaacaagtgtgtcacagtgtactgggaacttacaaatattcattgtttgatcttggaagtttcttccactattggctatggacagagtaaatttgcatgaggacatcttaaagtaaggactttctattgtttgatgacagagaatataccccaagaattattttatagttctttagtaggtgcatctgtatgattcttgctgctgtcaatcttgttttcaagttttgttctttttctcattggagtaatttctaacttcatgaattggacagcatttgcaaggtgagtgaaataatttattagtgctcccactttatgcaagtaatttagcaaaatgactcaaaaacttacaaatcaaaagtaagaataaagagacaaccgagaaattgtttatactgagaaaagcaagagatgttcaaaagcagaaaaaatccccacaaacatactaaaaacaaaccccacaaaacaaacaaatgaacagacaaaaacacacaagaaaccataaaagcatcaatatgatccatcttcactgatgatgaagtttcactgaaaatgtaataaaaagcatctacacctattacaaaatcaatatgataatcctcttatggtataggagcttggagatattagcttctaaaatctcaacatcttcttgatctaccaaagtatcctgtcctccactccacatgatagttggaaccttcatgttctccatcttgtaaaatggaggtatggtctaaaggaaaataaggaaggataacactcaaaactaggaaatcctattcaatgaaatgataatggttctggctaaaccataaacttgtttatgaactctcagctctggttatttaggaacagattattgattgtgccttaaatcaaataaaatgagtgagtttcaagctagaagctctccaaatctttattttattttcttttttcatttttttattgtttttaattactcatatttacatatccatccctccattccctctccctcccatcctcccatgttccccacccaacccaccccaacctcacccgcacccctcaaccccgactcctccccagggatagtaaggccctctaccaaggatattcaacatctgtcatatggtttgggagagtgtctagaaccctccttgctgtatctggactgcaatagtataactctgaagggaatgggctcccaaagtgctcccaaagtccatttgtgctctagggataaagactggctcctctgttaaaggacccatagactgtcttgaactcctagctggtacccacattcagagggtttggtttggtttggtccaatgatatttccccaagctttatgactagagtctccagagattgtgggattgataatgtctgacaaatcacagagttgtgaggttcgaatgtcatggtgtatagggatgtgctttacgcagggttataccagggaacatattactgtgtcattgtgaacacatccaaaggtctctttccatcatgttcctgggaaatatataataactccctaatcatttgaaattaggcatttggttagatcttttctttctcactggggagagacattgcatttaaataaaggaaacttacttgattgtagtgttgcatatttagaagctcgcttccccagtcataaggctgaaatgtacctttatgaataatctttaaaaagacaaacacattattacttaaaaataaatagaataagaaattaatatttccttattttctctttttatactataactgctgggtgaaaattaaatgtgttccacaagatgactactgcttgccataactctaggtgcattagataagtatctacagaacattttccaagagatcatatttaaaacaagtataaaaatattgaaattacaacattatggaaagaaaacttatcctgtcacctaagaaaatatctaaaaaatgatgtgaattaactattaatttaatttcaaaacaaatattagctcttgttttaaaagcaaactttaataatattctctttttttagtatatctaattttaatcatggcaaataaatttcagcttaaaaataattttaaataaaatgatttgaattactagagtccaagtaaataaattcttacatgaaaaacaatatgtatgtaatatccattttctagcaatataaagattggtttggactctgccctctgtcccgcggccagcgcctgagcctcaggtgagtctgggcgctgctctgccccccaacctcccccatcaacccctgctcacttgtgcctgaagacccgcccctggacaagagtggactggcccagacctgggagggcccaccctgagtctggacacaccccacctttgtccacccaccaccctctgacacccggcttctgccagaggctgagccctctgcctgccaccagagagagggagagaccctacctgcactcactggaagaagggatgggaagaagacagagtaagaacacactcaacaacaaaaaaaccaatatgacaccaccagaatctagagactccacaccagcaagatctgaaaagcccaacacagaggatgaagaagagatgaacctaaaaaattatctaaggtagatgatagagacctttaaagaggaaacaagaaaatcccttaaagaaatagaagaaaaaacaagcaaaaattagatgaaatggaggaaaagataaaccaaatagtcaagaaataaacaaatctcttaaagaatctaaagaaagccaagaaaaaagaaccaaacaagtgaagaaaacactcgaaacagttcaaggcatgaaagctgaaatagacacaataaagaaaacacagaatgaagagatgctggaaatagaaaggctggataaaggatcaggaactaaagatgtgagtataaccaatagaattcaatagatggaagagagaatctcagttgttgaagatttgctagaggatatacagtcatcgatcaaagaacatctcaagtctaacaaatccctaacacaaaatatccaggaaatatgggacacagtgaaaaggccaaacctaagaataataggtacagaagaaggtgaagaaatacagttcaaaggcacaaaaacatattcaacaaagacatagaagaaaactcccccacaacctacagaaggatatgcctatgaaaggacaagaagcctacagaacaccaaacagactggaccacaaaaagaaataccattgacatataataatcaaaacaccaaacctacagaataaagagaaaatattaagagcagcaaaagagaaagtccaagtaacatataacggcagacctatcagaatcacacccgacttctcaatgtaaactttgaaagccagaaggtccaggatagatatcctacaaacactaagggagcatggatgccagcccagactactgaacctagcaaaactttcagtcactatacatggagaaaaccagatattccatgacaaaaccagacttaaacaatacatatccacaaatccagcactacagaaagttctggaaggaaaactctaacccaacaaagatgactacactcataaaaacataggcaatagataatccaatttcaccaaacacgaaaagaaacaggaaggttaaatccacacacaatgataccaccaacaataaatccaaaacaaacaagaaccatcaatcaatggacattaacatccctcaaagtcaatggtcttaacctgcctataaaatgatacaggctaacagaatggatatgaagacagaatccatccttctgctgtttacaagaaacacacctcaacttcaaagacaggcattacctcagagtaaagggttgggaaagattttccaatcaaatgggtccaagaaacaagctggtgtagcaatcctaatatctaacaaattagacttcaaactacaatcaatcaaaaaagttgaagaagggcatttcatactcatcacaggaaaagtctatcaagatgaagtctcaatcaagaacatctatgccccaaatactaaggcatccacatttgtaaaagaaacattactaaagctcaaatcacacataaaaccacacacacttatagtaggagacttcaacaccctactctcaccactagacaggaccaccaggcagaaacttagcaagaaacaaaggatctaacagaacttatgacccaactgggtttaacagatacctatagaacattccatccaaacacaaaagaataaaccttcttcccagcaccacagccccatggaaccttctctaaaattgacctcatagttggcaacaaagcaaacttccacagatacaaaagaattaaaataagcccctgtatcctatcagatcaccatgctttaaagctagaactcaacagaaatacaaattgcagaaaaccttcaaacgcatggaaattgaataacactcaattgcaccattcctgggttgaggaagaagtaaaaaaagaaattaaagacttcctagaatttaatgagaatgtagtagacacaacagacccaaatttatggaacattctgaaagcagtgctaagaggaaagttcatagcactaagtgcccacatgaagaaactggagaaaactcacactagagaactgacagaacaacagaaagctttagaacaaaaagaagcaaacttaccaaggaggagtagactccaggaaataatcaaactgagggctgaaatcaataaggtagaaacttggaaaacattacaaagaatcaatgaaacaaagaggtggttctttgagaagataaacaagataaacaaaaacctctatccaaactaaccaaaaggcagagagagagcatgctaattaacaaaatcagaaacaaaaagggggatataacaacggacactgaggaaatacagagaatcttcaggtcatactttgaaaacctgtactccacaaaattcgaaaatctaaagaaattggaaaattttctaaatagatattacttaccaaaattaaaccaagaacagataagcagtttaaatcgacctataatccctaatgaaatagaagcagtcatcaaaagtctcccaaccaaaaaaagcacagggccagatggcttcactgaagaatgctaccagaaattcaaacaagagctaataccagtactcctcaaattgttccacacattacaagaagaagggacattgccaaactctttttatgaggctacgatcactttgatacccaagccacacaaagatataattaaaaaagagaactacagaccaatatccctcttgaacattgatgcaaaaatacccaacaaaacactggcaaattgaatccaagaacacatcagaaaaatcatccactgtgaacaagtaggcttcaccccagggatacaaggatggttcaacatatgaaaatccatcaatgtaatccaccatataaacaaactgaaaaagaaaaaccacatgaccatctcactagatgctgaaaaggccattgacaaaagccaacatcccttcatgataaagaccttggagagaacaggaataacaggaacatgtctaaacatgataaaggcaatatacaccaaaccaacagccaacatcaaactaaatggagagaaactcaagcgattcctctaaaatcaggaacaagctaaggctgtccactctctccatatctcttcaatattgtactaggtataaatggcatctcatgactcaaagaaacataaaattactgaagtacttaatttgtggaggtagtaggaagtggatgacgcttgatgagaaggtgataaaaatgaaagaggaagggatccagagtatgtggggagtcagaggaggaaaaagagtatttgtctcatggtaatgctttgtctaatatgtacagattcaatgtatttttattccaaaccagcatgtgtggtgaagtgaagcactaattcatctgttaatatccttttacaatccatgttgctctttaataacagtttagttctgtttatagatgaattttatagatgtcattaaattagacttagttacacctgccttttctgatattggacatagctcaacatggactagaacaagaaaagtttcaggaatatgacctggttattttaatgtaaactttatataagctagagtaatttgggaagagagactcagaaaatgtatggcttgtaaacaagtgtgtagaatattttcttaattagtggttgatgtgggggcacacatgggaggcacaagttctagacaggtgaacctttggtgtagaagaaagtaggcagtgcaaatagtggtaatgaaatattttgaacacatattattctctctcccactgatatggagcccagaaactgtagacccagctctgtgttctgttctagttttttaccccataaatcattcatatcaaagcacaatggagaaaagaagaaagatacactctagtaaaataacttcagtacaatagatcatggtgaagaatttaaatgaaagttgtgctgtgcctagaattgaatgaacttcattcatgaatatgttaattatgagttgaaattttaagaagtttgaaataccacaacttcatactcactgtcaccaatttaaaggctctaggtgttatggagtgtaacctaaattttagttctccttgttctttcctctctataaatatctgtgtgaatatgttctttggaagatcttctctacaagggacagtggctttgattacagtgaactctgacatttgctaagaaaccaaacatttgaaaagctctcaagatggatatggtcccaaaatttttcagagcttggcatgcctgtgatctgtcatgtggtgtacttttcaaaaggtatgtctacaaagaaaattccaaaactgttagtggaatatctctgtgttaatatttctcaaaaaaaaaaaaaggctggcttggcagtagtgactagataaagtccctctgagccacaagctctatatcacgtgactgttcatcccactttgctctcacataccctatgttatggtccgtctatcactcttcttagctttattctgttgtagtcaagttgtaaactgttttgggttgacttatgtaatagcttcattgaaaaagccagataatgattttgattaagttaagagaagatccaaatacatttccatgatatttttcaggaagtggcagacaattatttaagtttcatgaaaagctaaggggcagaaaggtagttttctgaacagtttgggtaattactttgaatttcatttaagctgtcttttggaaagtacagagatatttctgagtcttataggatgacatgaccaactttcaagtaaggaaggtgacagatacacatattatccaataacctgagtttacatggagacatgtactgtatcaagctaatacctacttcccagcaggtttaaatgtggtggctactgaaaacaatttgccttgttcatgtaattggaaacatactttgtttgttgaaacccaaaccgaagaaccccgaagccaatatgaatgttgtaagttattgttattaatcaacacactttaaagattcaccactattagtttcactcattctttcccaactgttgcatgtatgataatctgaaatttatctttacacagaaattgttactatactctctaaaggcaatttactgaagaatcacaaaagtttccagatgacccaactaatgaaagtcattgtgttttttcttccacatttagagtgagattatttcctattggggctataaatgggaagtgtatgaagttgtgagtggtgatggttacattcttccaatttatcggattccacgtgggaagaatgagatcatggattcatgtaacggtgagtgacaagtactgagatttaaatgcattctgtgaaaatccctccatcagttacctctaataagaagcttccaatcctccctggattccacatgcaaatcaggagtatgtgtgatacctgccatggtagttcctattactacacaaataaacaccatctgtctcataaatttagattttgcagaggataaaagctcagaatccctgcctaaaaagccaagaacctctaagcccactgacactgtaatgcttgagttactgctgtgagagtttacaatatccttctaagtgatgattgctgctcctggttcattctgactatatgtttagatgtcccacatacgatattcatgttcaatgacttattgttgtagttatttattatataatttttatattgtcttttgccttacatgagtttaaactttttctagaaaataataaagcttgaaaattttataaattaaaaacctttgggaaattcatatctattcaataaggaataggaagaaaatgggatccaatgagcacagtgattattttactctgaagaaaatgcatgatatttatgtatgaggataaccagctgttaacacttctattcaatttacatcttcattatggcaaacacgccaacaaacaaaagacaagccttgttgcctttaatcacagcactagggaggcagaagcaggtggatctgatgagttcgaggccaccccggttgacataacaagttccaggccattcaggcttatacatggagacagtatcacgaaacaaaaacaaacaagcaaaaacccgaatccaacagttctatgatgagtgaaaatattatcaagtgttttttaggaaggaaatagatgtcaaagaggataaatggaagatgcaaatatgagaaaactgaaatgacatacatgcataaaaatataataagctccattattttgtgttcataaaaatcaataaaaaataacaaatatgttttcttttcagccccaaagacagtagtgtatttgcagcatggcttgactctatctgcttctgcttggattctcaaccctcccagtagcagcttgggcttccttctggcagatgctaattttgatgtgtggctggggaacagcagaggcaataattatgccatgaaacatgtgtacctagacccaaattgtaaagcattctgggattttaggtaagaggaaagatcttttatcttggtatgttttccttaaagctatgtttaacacttataagttgtcacaaatttactcaacttgactaaaataacttcatcaaaatgtcatcagaataatattttgaataatatatgatttacttttagtgtgtgtgtctatgggtctttgtgtatgtgtatgtatgtgtgtatgcatgtgtgtgtgcatgtagtatatgtgtgtgtgtatgtgtatgtatgtgtttatgtgcgtgtatgtgtgtgtgtatgtgcgtgagtgtgtgtatgtgtgtgtatgtgtgtatgtatgtgtgtatatatgtgtgtgtgtattgtgtgtgtgtgtgtatgtgtgtttgtatgtgtatggatgtgtgtgtgtgtgtgtgtatgtgtggtgtatttatgtgtgtgtgtgtgtgtgtgtgtgtgtgtgtgtgtgtgtgtgtgtatacggagcccattggtcccaggatttgcatccatcatcctagaactggagtttagatgtctgtgagatgttattgagacaagtaagtctcctgaagcatggagacatctccagctccttgaatgaatgatattttaaaaggttgataggtaaatgtttgcctaaaattttatattattaatttaaagataaaagcaaattttaaatatcatttctatatatctccttacttgtaattactaatcaatttgctattttgtctccttcttttaggaaatatttcactgaggtatgtttgaatagataaagcgttcatattttgtgaatacaacttgatgagcatatgcttaacttctaatcatctatattttttattttttacttttgatgaggcttttattttatgaaaacaaaaacagggaaggaataaaaggaacaaaatgtacaaggttcatttctatcacaaaatgtcagaaaatcattgagaaatttcttcctgtttccatttttgaagatactctaactttattgatcattgtaacatgtcttactcacacacaaataaaaactagacatacatatgtcatggaaatattatctggtatattatctaataaattcagatgtagaacaaatgcaattagggatatagtaagtcacttaaatagctctgatcttgactctgtttaaatggaccaaacaaaagatcatttcaaagcattgtgagcattgtagaaaattggggtgtgtgatggggagcatgatgcagagcatgcagtagatatttgattagtgttatctcaatacccatgcgtccctatggaaatttttttcaagtcacggtttcccctgaaaagataatgatcaattattataattaaccaaactccttaatttctgtttcacacagttttaatgaacaaataaaatttgacattccagccatcattgatttcattgtgaacaagacaggacagaaacaaatctactatgttggccattcccagggcacccttcttggtatgctgagagagactaaaatctgcccatcttgtaatttttaattgtaaaccacataagcattctttaaaaataacttcatttatagaaatggcattttgttagtatttaaaaacattcagactagccaaaaaatgaattcatttgttgcagtggtttaatttgctaacagacagccatgtttgttgttgtttggcacagagtattgctgcctaccccggctgggttccaccatgcaagcctctgactccacttctcaaatggtgtgattacaggcatggctgattgcacttggctaatcttcaaaataacagatagaataatagatacattcattatttgctttttaaaataatcatcatttcaaagaaatgagatatgtgaacaatgcaaaaatgtgatagagtcacttgggattcttagcactttccaaaactaagcttaacacattgttttttgatatccttaactgatttctgaggtcccagtgagcatccacagagctttgagtagtattttactggaataatctgaggcatgctaatttatataatgtgattacaagaaaaaatgcatgcttccaaaccttatactccctggaaaaacatttctaaacagtttgcatgcaactggtttgaaaatagccttcttactgcttgggtactttgctggcagttagctaccatgcacatagtacactaatgaaatgtacttctcccgaaactctcagtcttttgaggaaagataagggatcaatagtacaggtcctcatatttactgggccacatgttttctcttgaggatgtctttggaggatatacattctatgaggctaaatggtatctggagtgtctactaactagatgggacttgtaacaagcaaaattgtcttctcatgttagtaatgttccctaagatcaaagaaatccttaaggaagaactagagcataaatggaataatatttaccaaacgttttccaagtagtcttaaactataatttgttattgtgtttgtgtacacacacaaggcctgggattggaggaccagacaagtagaagctataaatatcattctccagccatagaagagggaatatccaactattagagaagattttaatgataaaataaaaattaatttaaattttggtgcccattaaattttgatgtctttttctaaagatagtctactcagccctcataaccaatcatctaaatgtgaatgtgtacacaagtcttccatgcaaaccactttcagtatgaccagaaggaaaatacttaaaagatcaatgtaacagaaatgtaacattctagattccaaaattgtaagagagattaattaacaatcaggaaatacttgatttttctacatttgtcactttttaatttttacatttttaatttttatttatttattttgttaatgaaatgtattcatttattttacatcacagccacagttttctgtccttcctctactctcattcccatcccccacccaaccccccccactcctgtttttgaccagagagcagaaggattcccatgggtgtcaacaaagcataacatatcaagttgaggaaggactaagctcctctacttgtattgaggcttagcaaggaaacccagtatgaggaataggttcctggaaaccagggtcttcacaagggaacccacagaaacaactaacctgggctcataggagttcaaagactctggatggacagcagggagcctgcatgaatttgacctaggtcctctgcatatgtgtgccagctttgcagcttgatctacttgtgagacccctagttgtgggtgcagggcctgtccctaatgctctggctaattagtcacttatttttttttgtaatataacatactaagttattgaatatctagttaaacaaacaaaacctttcacagtgacagttaaaatgaggtccacatcaaatgtagcttaaagaaagtaacctagtggtgtgcttccaggtgaatcagaattactcaaccaaagtttcacaaatatgacacagaatacacggagagtctctgttgtgattaaaaatgacacagtacttggaaccaagagagaataggaaaaatgtaatctgttctcttgttttctttcagcttatggggcatttgcaacaaacccacagctggcccagaaaattaaagccaaccttgccctgacccctgttgtgactaccaggtatctgtcaggtgcctttcgcacgattgcatacgttcacccaacagtgatcaaggtttgtaatactttctaggaccccctcagaaatagaagttaggtgcagttttcaagaatacgaatggtacccacttaagaccagagatgctgaggcaataccatgctgcctctctgctcggagtttttgtaaaaacacagcccccccacagctggtactgtatatcacaggttgccaggttttgttatccaccagttgactaaggttcttttttttttatacttacacatctacttttcttatctactgaaacctttattaatagattttatcatacaaatgtgcaatctgcatttgattttaaagttttctatcatgtctggtttttagactgaaatttcaatagagtgaatgggattatccccttttatcttctctttcttcccatagacttgactgtagcattcactttccctgttgttttagaactcattttaatcccatcttgtacaaagtgctgaaaatatattaattataaatgctttagtgtgcagaaaagctttagctagcaaagttggatagagggttttgcattataaacagtttactgatcacatatcttttgtattcttgctatagtttgtctctttaaaatagtgagccatctaactgacattgatttataatttgtttggcttttacttgcaataatgaccaatgactcagcatcatttcatttatacagagagttgcatctgactcttcttaactaatagctttctgatttttttgttttatgcatttacatagatacattctctaaagcagataaaactgccagctgttcttttctcatacatgtctatgattaacagcctctactcagggatattaagaacagagaaaaccactttcttaatcttacttggaactctcttgtcctagtttagttgcagatcagataggggaacatttagcctttcaaaacctacatgtcaactctaaagttcaaaaaggtgttttctctatagatgaaatacttttccatattagtgtttgtttttattcatgcatatttggatgtgtctgtgtaagtacattctctctctctctctctctctctctctctctctctctctctctctctctctctgtgtgtgtgtgtgtgtgtgtgtgtgtgtgtgtgtgtgtgtgtgtgtgtgtattcatacacatggtggaaactgtgtatggtttttgtgggaaggcacaaatgtatgcagctgttcttgcatatttgtgcacctgcatgaggagccaaatgtcagtgtctggagaatttctgacttagtcttgtcttcttttgagacagcatctctcagcaaactcaggactcaccaattggctagaccactgggcattgggctgaggatctacctggctcttctgactctgggtttgggcagtagacatacacttggcttttgggctggttaggagttgaactcatgctctcatgcagcagatgctttcccagctgaatcatctcagcctcatgcattgttttatagttctagtatgacgagaatgtcaataacaaacatatattcaatgttgttgatatgtcatctctttctatggaaattacctcgtgtttattattccttttcaatcagttattatggtccattgtgtctacagatttttctgaaagtttagtcccattttcatttcattgacaaaccttacttcttaatgtattattggttttgtatattaacattccttctttcaaaacattaagatgttttggcatttagagctctgcaaactattacttgctgctggctttccttcaaccttcttttctaattatagtgccagggtaaggaaaacctcttgaaatagctggaaacgactctctttgcttcacttctatcaaaggcattgtgtaattatagatgctttggtatttgggagatttcagtagtgaaattatctggttatggattttgtttatttgaaagtataaccaacaaatgctattttactagcccaatctttctaacacttgttttcaaacagtctgtctattgaatctattgaagtgacattattatcatggaattattttctagtgactcaattaagagatgcaggatactgttaggtgttgtggtgcacactggtaattgcagtaggcagtaacactgaggctgaaggatcactgtgacttccaggccagcctggcatatagtgccaatcctcatctcaacacaaagtgatgcttctatatttgtttcagtctctactgaattatttggctagcctttcagctctgataagcttggctagaggtgtcatttgataatttcctggtggaatcaaacctgggtctattgactttatttatttatttatattagatcaaattagaaacaagcctgttttacaagtcaatccctgtttcctctacctccccttcttactcacaccctaccaacctcccaccccattcctcctctgctccccaggaagggtaaggccctccatgggggatcctcaaagtctgtatcatccttggcagtgtcattaccatgtcctctcgatttaaaagaaaagcacttctaacatttcttgtatcattagccattaattatactggtttctttacttgtgaataaccttattttaactaactacataaataatacttttgttattgataacattttaaatttagaggcatgagccatggcttaatggttgtgagtacctttcttgaaggctggagttttgctccaagacctgtggcccactgccacctaaaattccatctctgagaacctgactccctcttctgatctctgtgggcaatgtacacaggcacatatttaaatatacaaaaataaaacatactttaaaagaattttaaatataaagctatttaagatttcactgacaattcaaagatgttgctttatcctatttctatttctattttttcccagttttaaaaaacaatcagttaccacggtcataagatttcctcagtttaatgttcttttctcctagaccattggatttttctcattcttatttaaatcaatgtatcacatgtctcttaaagcttgtgtatccttttttaggcttcagtccattaagtttgatgctgatacagcaaaatagatgaattaagtaaaccttgaaagtttatgagttcagggcttttatttggtctgcatcagtctacccaaagtacatgcaaggttttcttatcaccatctgagtatagagtatcttgatatggctttcactgtagcatgttaatgtctcctagaatattattcttcataagagtctctattttttctaggacattacatagacagttgaaaattttttattaatttctagagacatcaaaagtctggatactttaatcagtattctcattgctgtgaccaagagcatatttctttatttgtttttggttgtccttatgacacaaatctaaaacaagttttcctgataaatttgataaatttgattctattcaaaaaagagaatggtgtctgtattccctctgtatgaatattagaaatcagttgctttttgtgctgttttatcaagttcctctattcacagtcattttgggcttctattccttactttccaggtagccattacaattggtttgtgatatcagacttttttaataatttaattttgatagaatctgttgtcatgtactgagcttgtaagtatgtagaggcacttggagctgtgcctgttgacctgagttcaaaccctgagacccacatgatggaaggagacacctgccttatatcctctgaatactacccatgcaccatggcatacaaaactttataaaatattcttaagtgtcatgtactatagatatttcttttcattatctaacttacacaataattactttacatagcatgtcacatatctattttttagatattagtttcttcattagtttgatagatttatggcttgcatgaattaaaagacactcctgcagatgtagacttaaattttttcaatacatgaaaagacataattctctctcatttaaaaaatggcataggtaatctccatcacctcagataattcattatttataaaaatgttctgtggagcagaaaatagctatttcagggcataccacttaggagccagaagatgttattgtgcacaaaaccatataaatttatcagtatattgaaatgttgcattgcaaatcaaactccatctgtcattgcttcttactggacaatagtctcaggaccattatttaaatatgtaatttttcagcaagtctttggagaaaaggaaataataaccggaaaagatgacaaccatatcattcagttcatttgccatcggcagacaatcagaactgtttgtaataatctactgacactgctattcggacataatccccaaaatttgaatgaggtatgtgtgatttttgtctttaggtcagtgttttttgatagtgattgctaatgctatcatcttattattaggtagacattaaaaatgcaaagtacttgctcatagaatatagaacaacttaactgacataatatgaatagctcattttataaaatttggcatagtttgcatataatttctaaagttatgaatatggccataaaatccatctatagtatttatggataaactaatatttttctcttatttcttttcaataatcacattaagattaagacttctttccataaaaagtttttctccatcacatactatcatatataaaacaaacaaaaacacttaatttccttgctgtggtcaaaatccaatctttctttttaattgattcagtaaagatttgatcataaaagtcacacagttctgcaatactattttaaactctcatactcttagaaagacactatccccctctcattcacccagctctctctccctaccctcaggataccaattagctcaggagatcctgccccttctcttctccaggttccaagcattcctctcttagagtccttcttgtttcctagttcctatggtgatgaggatgtaggctgctaatcctttgctctatgtctaaaattcatataagaatgagagggggaggagaggtggggataggatgaaaaggagtatcaggaaggttgagtcaggaaaatagaggggggataagggtgggtaatagtcggggttaggggaaggggaaggagagggagaggggactgagatgagaaccaccttgtttctaaatttaactaataaaaaaataatctcttggaaaaaaataaagaaagacactaaccatgttttgctatttcccagagtcgtattgatgtgtatgctgggcaaattcgggcaggaacttcagtgaggagtatacttcatttttctcaggtaaactttttctgtacttcaattccttttctcttttgtttgaaatcttccctacttgatgggttgtgtcaatactctatcttgtgatgatgatgatgatgatgatgatgatgatgatgatgagagtagatagtaacaatgatatctctgatgccaagaggagaatccctgctctgtgcagaaatgttcattgtgaaaaggattttttccattcttatgtcttctaagcagtaacttttattttaaaacttgaaaattttcttgatgatatgaggaagctggcctccaggagagctgaggttataaacccagcccagtccagaagcttttgaccatagaggatagagatgattggtgctgaacaggatatcacagataggatgactgaacattgtgttttctaaacaagaaaatatatttaaatttaaaaacatagaaaattagtataaaacttgtttacataaaattaatactgatttacaagtatcaggtattagtgaaaggtagaaattttaggtgcctttgaggtctaagcataaattgtgaaacatttccttcataagttttaatatctccatgacaacaaagtggaataaacttgaaaatgaccttaccctaccaagaacattgccaggatgtgagatagtacctatcatcaagatgtatatcctcttatttggaatttcttcttcattcatgggtattcattttttcataattcatgtctgagctgtattcttcattttgcctggactcactggtatgaagtttctggctctattgggcaatacccataagagtgacatgtgtcagattttagcaggtatttcatactcttatcttgactggagaaatctgttaatcacctcttgggaatgtgggcatcatgtgctttagacttttacctcccaatatggggtgctggcatttttacaggaccatgagaaaatagagattatgatcaagtcctggggaatccacctgttatccagtcttggtatgatgataaaatgcaagtctatctgaagtcctagctggagtagtctaagaggctggaccatattaaataactgtcttgaaattgtttggagcagtttgtagtccaaagctgatcatggatggcattttacagattagtggtgttaccacaatcccaatgtgatcatcattgtgagacaccatcatcttttggagacttcaaaggtcactgatagtattgttcatcattcactgtagaaaatggaaacattttaactgtcatatgcagcagatctaggaaaggttaaatgaccacaacctattaaatatacccaggatatatagtcttaattcctaaatacttgctttagactcaagcctaaaatcacacactgaaagttacatgaagcctaaagttagtattacttaatactctatatgaccattaatatcaagacagaaaatttaaaatttgagataatagttatactttaataaaagctttaaagacaaaataaatcctagggacataacattaatgacaatataatagtccatagattttgcttttcttctgtctcataccaggtggcttttctgacataagacagagattttggattttattttaacaaacatggttggctttagagaaggagacagccatgctccaactccaaaaccagctttagtttttaattaagttgggactatatgaagtccaactgcctaacatgtctgtagagaacaggaaaacattttgaaagtttcatgaaattttatcctgttggaagtgtgctatgccattaggtcaacttccttctttcctggggacattctttcacccttctttttcagacgcttcatatgtccaaagatcttcagattccttcagatgcttttaatctcttggaaagaacaaaagaaaaccaggcccagccttaattttggtgaattttcctttttgccagtttgaattgccatgctgctttatgaactattgcctctcctaatcaagaggtctctcatgtttgaattgaatatttataatttgatagtatccagagctttttctcccatagaaacagaaccaaaacctctttcccaatgtgacacataccctggttaccattctgaggtcaacacatctgtaaaatgtacagggagatttagtttaacagtttggttttttctattatccaatgtctctccaaagttggtgttccctttttcattagcatttataaattttaaggttaataaaccatgatgcatttgatctctagtggtcattagtacccccttcagttgattaaccatttcttttaaagtgatattagatatttctataacttattgttatttaagattgtgtggtatacctgtaatatgatttatcctataatatgtttaaaataaatgttgtattttactaaagattttaatttatacaggtattcccataatgtccaaaatccctaataagaatattacaggcataccacatcattctatagggcaagcagttatagaaagatctaaatgaactctaaaaatatgcttaataaacagaaaggggtaataaagacagctagaaatagatttttaacctaatgttatacccaatctttctatcaaacatgtgtagctcttactcattgtgataacttgattatatctgcaacgaactataatccagaaatggagggcacacttgtaatctgggtcttgaggcaagatacaacatgccttgaatccagaccaccagaggggaagacaaaaagttttttaatcagatatggaggctggaaggcacacccctaatctgggccacaccttctgctggaagcccatataaggacaatgaaagaagaaagagttagttctttgcctgcttgccctcaccttgtcaatagattaattccttcactggagtagagcctacttcattgggattccaacataaacagaagaccagctgggatactcagcctcctgagactgagcagctactagattcttggactttccattcagagacagacagacagacagacagacagacagacagacagatagataggtagataagatagatagataaatatagatagatagattcatattccttccataagttctgtgactctagaaaaccctaactaatacaatcatctttgttttagaaatagctcacaaaaatatatgtagaaatatatgtagaaatatatgtagaaatatatatatatatatatatgattctaaattgcaagttacatctttgtcaagtgagccattctatatgaagtttaatataaaatacttccttttattttatttttctattgattctttggtaatttcacatcatgtaccctaatctcacctatcacccagtgctccacatccaccctccacccttgtaatgtcccccaaaggaaaagtataaacgaaattttgaaaatcagttaaatataaaaagaagaaaaatattaacacaaacaatacagtaaaaacaaaaacacaaatacaaataacaatatcaacttcaataaaaaaacaaaaaagtacgcacacaaagcaacaacaaaaaagtccactttgctcctccatctttgcctctccattgtcttttcattattcttagcagcattaggagctgctgtgtattgtgcattacagtgttctgtgcaagctgctattcttgcaaatgttccttgtgtaatgtgttgttagtcaggttcaaggactctggctccctgcacaccatcaatcctgaactccaatggaaactccacatatatcccactgttgcccagactcatgcagatcatgtagccatagctctgaagtgatatgggaatacttatgtgtatgtttatcttattgattgtttaataaagttctgtttggccaaaagaaacagcaagttagacaggattaggagtcaaagaggattctgggaaatgtagtagagtagtggtgatccaggctggaagtgacatagcaaggagattcatttttagcaaagagaaagaggaaggcccctgtcccctggctcctccagctgatccatgtgagccacaggcaagagagggcaccaacgaaaggcatcctctataagacaagtcttataaactatatagatttatgatagttaagactgagctaaccgatgagaatcctagtcattggccaaacagctttgacctaacacaagtctctctgtgagttaatttgggccctaactagggtgggcagctggcctaaagcacacacgtggtggtggggctcgggcgacgttagcagaatgatttatcgtaacattgcaggaccattcctttcattcactccagtagataatagatggggtattataagagaaactatggccagccagccaaagccacagatactctgccctcggtgcccaggccagcttgcatgaacatgtgcattctaggcaggcatttcctccctgagccaagccatcaagcctgactcaatacccagatactactgacagtgagacacctgacccagagacaccaatgaggaaaagacaatgcagcagagtcagccacctgagccaataggaccttgggagggggtataaaggcaggtctaactaccttaataaacaagtctgcagcacgctctgctactcactgactctcagtgcctaagttgctggtgctgtgtattttcaccccttcccccaaggggtgtcctagcagggtaacatgcaaaagggtgtatgtttgggtgttccaaatcagagctatggatatgtacctgggtgtctgctgagttgctcagccctggcctcttggatcacacccttcaggtgactggcagaaacagctttcctaggatcatgatgacaggtaaggacatttttctcaagtgtgagaggccaaaacagttccaaacaaaaataacatgccaggaagtattatcatacttaatttcaaactatagcacataaatatagtagtaaaactgcaaagtactgacacataagcagatacattaatcaatggaataggattggaaacccagctataagtccacacaacttcagttgtcttgatttctgacaaaggtgccaaaaaaatacacacagaataaactatgttttcagcaaatggtgcttagaaaactggattttgtcaggtaaaaagataaaattagattcttatctctaactgtacagaaaagtcaactctaactgggtcaaagatccccaacatgagacctcatatcttgaaagcagtagaaggggagaaaaaggcttcaatttgtatacacaggtaaggatgttctgaaaaagattctagcatcacaggaaacaagacaagaatgggaaatgacattcaagtggaggcaagtgtttgtacaagtttgtggagatattatacagttacggcatttatgttacacaataaaggctgttgatgccagaaagtgaaaggaactgagattataaaggaagatatgaactgtgagatacaattaggcacaatatcatgtaatataggtttagtttttgaatttaatattatagtaagtgtacataataatcactatataatataaaagtctgaatataatatctattgtttaaaataaaatattttatgagtcacataaaacacacttctattttgtatgcagccatatgttgttttgactacattattctttattttaactgtgagaatttgctttattttaagcagtttggtaaaatctcatcatcctctttttttttttctagtatccaaatactgaatttctatgtgttacaagaaaagcagaattatctagtttataattttggatatttaagaatatggcaaagatgttgcctcacactggtgagggcatcattacaatggtggaatagaaactgaagacatcatttggtgaaacgggaagcaagagcatgcaggtacaattacctgaaacatctgtaactccagttttaacaccatctaacaacctcttttggaatcagacacacaagtggtgccctgacataacatacacctaaaaaaaaatgccaattgtctctggtgaacactctttggttgactttcccattgccagatcaccatgtcaataaatagaagcatagaactcctaataaataagaaatttatgtaagagaatatgatagtggattatgtaataaattgtgttatactgaagctatctcttacctaacattttcaaaatatttaagaatgacttcaaataacttttaaatagatatttaaaaaaaaaacttgtaagcttgcaaatgataccttctgtggggaagaaaagatgtttacgttatttgtccaaaacactcacatcctagctgggtggtggtagcacatacctttaatcccagaaccttggaggcagaggcaggaggatctctgggagttccaggacaggctccaaagctacacagagaaatcctgtcttgagaataaataaataaataaataaataaacaaacaaacaaacaaacacatcatttgctaacatcactacacaaagttaatgatggtttcttaatgtagatagacatcaataccttctgtgtaccaagatactggttactgagttgaggatgtaaagaaaataagcagaataagattactggatagtttcagagcaatagtaagaagttacaagtaaggaaagcaagcagaagagttgatcaataataacaaggagaggatgtgaagtggctctggttacagataaaatgaaaagtggtaaaggaacttcatcagatacaaaacaaaccaggcactcacaggatgaatatgtgtgacttcactacacgccagcctgtgtcccttgggaacacctatgaaagatgggggccgtggtgtagagggtggtcacaagcagccaactctcaatggcttagcttggaactttccctcgtaggctagactagctggctaggaagacagatactgctttctctttttccattttaccactactgagaatctgcaggttccatgaatggaacccaggttgttagtctttcactgtaattcctttgacctctttagacatcttgccaggacttctttaaaaaattaattaaaaatatcagaaatatatttctgtgagaagaatctctcccaaccagacctgatctactgctgctatacaatattaacctacaaaacagcaaagtcaccttgacctaatgaccctcgctagggtcctcctgtcatgccttacacattcaaggtagcaacacaactctgggcaagtttccagtccacagtcctctgggattatgaataaaatccaggcttcactcttaaagcttcatataatgtcccctcagggcctgtttccctctcaggaccttcatgcaggtctaaccttctacacaatcaatggctgccctctgtgattctccttaactgtggaggaagattccacaatccctttactcacatccttcatgactctgaagccaggcacagcaaggctggcccattggatcacatttgtagcagcttttgtttgttgattttgtttttcaggaatggaaattcatcatacttttcctttccacaacttgtaagcttagctgggtggggactttcttggagaggacctctccctgtattaaattttggatcaagcctcaccttcatctcacctcttttaatacaagccttggctccaacttttaaatttcctggtgtttgttttctcttcacactataatttttttaatttgttttgttctacttgctccttttctttgtagatccttgtaagagtgatcactaggaaccatatgacagagttgatagtaagctgtctttatattttagtctcagtacagaaattgccacattcttttccaaactaccacaagtgtgatctctagaacagttgcttctgttgttctctctgagccttcttgagctgggctgccatagcccttatatgtttatccatatgatgagaaacatgagcaccaagtggctcttgagtttagctttctgtactactggacagaaggacagagtccctactgcataaaagtcccaggttttcaggcctactggccctgtttggacctttagttactgtagtaagagttcgccatcatcatcttggtgatagtatctgatcctgggtccacaggtcccagtctctttgccagtactgaagggaccagctctcctttcggctttcatagtggcggaacatgtgctggtgtgaccttgtcctggacactagaaagtcagatgcctgcctcgtgaaaaggaaccaatcagaagttagctggtggcgctatgctttacgaccctggatgtactttacagacaagcacacagcaatgacgcagagcatagcaaccaccctgggtgggcctataggccataacaaccagttgaccaatcaacacagggaaagccctcaaaggttggaggcacaccaatagtgagcctgtgggtacctcaagacactccccttacgctgccctacaagatctgtatgcagccagttcaagctgtctttgctagccatctgccatggtgggtgggtgaaagacccgagctaacatggggttagctcgttaaattacaataaagcctcatgcagtttgcagcaagctctcaaatccgcctggtgattggggtgactgaggtcgtggcctgggaccccggatacttgagttttccaggggtctaacaccttgaacaatattagaaatttatatacagtatgttttaaaaaaattaatctcaatatacaaaatttgcatacaatatacaaagtccaatctaattttaaaatatttaaaactagtagttgatttgtaaaaatagatttaataacttatcatatctatatcctcccttttttcttttcagaataaatgcaataatctacccttttatcctatcatgtctatgtaccccttttttttcttttcaaaacaaaaactcttaatttaatctcctttgtgtacctttttcctaatcattaccaataacaacttgtaaacaattcactaaacaatgacaaatattcataattcagtgagtgaccaaaatccacccaacctatctttgggaatgtggacatcatattcttaaatttacttcatattgttttggtatgatggcatctttagggaatcatgaaaagaaatgttgtgctaattgtcaagtcggggggtgggggagtaactgtgtcatttttgttcggtctcaataatgagaaagtcagggcttgtcttaagtcctagctagagttgtctgtgtggctggatcatctcagcaagctacctcttaaatattctgagcagcttttagttcaaatatttagttggagtttttcagctgtgttgtattaacatagtttagtggaattatcatgtgtggggccccaacctgcttttggaaacttcaaaggttgctggtagacatggtcatggttcgtttcagaaaaatgatagaaactcaaacccaaaatcatgtacacaaaggttgaaaactttaaaaagaaaagaacagccttcattgtgtcccataaagttggttgtactgtgttttcacttctattcaattctaaattttttttttatttctgtcttgactaatttttcactcagtactaaattgttcaatttctatgagttcatatgttttctgctatttcaatagtcattggtattaagattaaatccacaatggtcagattggataaagggtgtttctgcaattttcttgtataaagacttgccttgtgcccaggtacctcactttgggggtcaatttctgtgaataaacaccatgaacaacttaaggaggaagggtttttgacttacacttccacatcacaaaaggaagttagaagaactcaaacagagcaggatccagaaggcaggagttgatccagaagccatggagagtgttgcttactgacttgctctcttcatgcttttctcagtctgctttcttatagaagctaggactattatcccaagaatggcaccacataccatttgaggctctctcccattgatcacaaattgagaaaaatatcttccatcttgaggatggttgagaaccactctcctatataaaataaccatgatttaagtacctttaattaataagtacttcaaatatttttcaggcaattttttattatattagtttattttgaattatgtgtatatgtgtatctgtgtatgggtttgaacatgtgagtattgggtcctgagaaattcagaagaaagagtcagatcccctggaactggagtggcaggcagttgttaacctactgttgggaacaaacttggtgctctcaaggagcagtgtgcagctcttcaccaccgagccctcagagtcttagctgtgctaacaggactctaaaaagatttgaatcatctcagtcccttgagtctcgaattgtagttatcaagattaatagtttagtaatcagcctaagtaatctgtaattgtattatgtattaagtttgacttttatgagttatatcttagactattgaggactaaagtacacgagtatttttgaataaagagatttgccttatcaaattggaaacacaaaaaagactttgcttggtgaagttcttgcagaatcctcagtgctcatcatgctttgtgagcagtgacctcactgttctaagacttgcaaccagtatggtgacaatgcctgtctgactccatcatgctgtctgttcacagaatataataaaaattccagaaagagcgtttaattgttaggagtggtataaatgagtacaaattctgacacaggcaacagagtaatcaaacaagtctaggaagaaaaacaaacccattttacactaattattcctgaaagcataccttaatgctttgataggagggtaggaattgagggaatggtaatgtcttccttgaagtgcaaggttattagtgttaaaatcctatcatagcttagtgggagaagttttatgaaagaaacatgtaagtaactcagttctactttagtagaagccctgttttctgagtgagagccttgttgtgcagactttgatcagggacgataacatggcaaagccaatgcagacattccagctctcattcataaatctgagtagagccttatgggattgatgggagaagatgatggaggaagaaattaggagtggtattttactggggatttagtactctcatacatacattaaatacagtcatcatggcttagacatgaacagtcttcctgaaatgtgtaagtgccagcatttgatctctgggtagtgcaattttagaaggtcatggaagctttgagaggcgggacctggctggcaaagtaggcaggtgggaacaggtccttggtcactcttatctctgtcccctttctgtttcctgtcctcagaaagataacaaagtttccatgacacagatcacatggtgtgatgctattttcagatgcatggggccaagtgcttgtggacttaagcatctgaaaacattggaaaaatcaaacttccttttttatttaaatatttttaattttgcatactagtccaagttccccttattcctccctgctctgagagatggctcagtggctgagagcactggctgttctttcagaggacctgggttcaattctaagcacccacatggtggctcaaacttctttaacattgttctctcaggtattttggttatcataatgtaaaagaaatcaattcagagatatttttaaagacaaatatattttaaaagttgaaaacctagatataaaattgatagcatttatggtcatagaataaagaaattattagtggaaaaaataaaatccctctgaagcattctcaaggaaagattacactaccgaaattgacgtgggaaaccagtaaatgagagcaaatgagacagagaagaatgtaatcttaagatacttgcatgtgacataaggccacattatgcccagagttctaagctagtagaacttcaaaatcctatctatgtgtagtgatgctgtaagcgtttttgtttgtttctttgctgtcaacttgacccaagttggtaagaggaatgccaattgaggaattgcctccatcacatttgcctccagacaggaccatggggcatcaaattcattagtgattgatgagtatactgtgaacaatgtcacccttagacaggttattctggtttgtatgaaaaaggtaacttagcaagcaatggtgagcaaattagtaagcatccctctatgcacctggttcattttttgcatctagtttcttgccatgacgccattcccttcatgatattttgtgattaagatatataaggtgtaataaccctttccttcccagatagtctttatcacaacaatagaaacaaaactaagacagtaggtaaggaaaaactgcaagagttgcagcatcatgcaggcttatatcaaggttcctgaaaattgctgactccagacagtctataccagctattgcccattcagggaagccctaagaggccatggtgtgaagctgtgaaggtgaagcctaagttaaaaataagctctggtatgttggagatgccggcttcaaggggtgtttactgaggaaggatgcagtctgaaaaagaaatgacatgtgctacaggcctccaaactggagcaagttgtctgttcaagcctgaagcccagataatgccttcacaattctcagatgttagacgtggagcttcaaggttattctgaggcttttccactttgctttcatctgaatttccttgtcatcctctgactctagcattttggaatgtgaatgtcaaccttgtgacactttacaccggaagtatgtaattttttttctcgaaaaagcagtttttctgggattcatagttaaaagcttaaatgtcagtagagactcagatttctaggaagcattgggcatgctaaggctttgcacacatctgaagacggattaagtatacttcgcattaatcatgaggtgataagattttgcaggtcaggagtgaaatattatgtttaaaatcatgtttggtagtaattaagatgtggagcaaatctcttacatcccctgacagatgactggataagtagaatgtggtatttgcacacaacactattatattcagtcacaaagaaaaatgaaatcatggcattcgcaggaaaataaatggactagagattaccatactaacttgcataagccaggctcagaaagacaaatgttgcaaagagagacacacaaaggcagactcacaagacaaatgaattttccttcacctgtggatcttaaatgttaatgctcattgtgtacacgcatgcttctgtggaggcgtgtaagccacagaacaaggacgaggatccttcctctcaggctgcctcttcactgatgatggctagcagcttctgcccagtgctttttcagagcagcagcagcagcagcagcagcaacaacaacaaaattcgtctataaccaaaacagtgaactagtgatgctgggtttgttctttcctacatctcacttgaaaatttttctaacatgatttattcttttgtgggctttatgagtttgcaaatctttccctctttaagtgtagttttaactgtggcttaggggtcaccaattactttagtttattctgattgaggcaggcttttatccttcagttttaaataataactattctggttcatagtctttgtttcctctggattttatggtctttgctgagaagtctgtttgtgtgatatatctgactgtctaagtaactcataatttctcctttgtggctcttggctttcattctccatacttgaggcttttaaaattaactaattaattaattaattttcccatccagatcacagtttcccctccttccctctgtcatccctcctcccctttccccttgctctccttcctatctctcccctaacctcctccatccacccctcctcctttctcttcagaaaaggtctggtctcccatgtatatcagccagccatggaaaatcaagttgcagtaagactaggcaacccctctcctattaaggctgaatgaggcaagacagtaggagaaaggggtccccaaaacaggtaacagagtcagaaatagactctggttctactgttaggagttgtacaagaggaccaagccacacaattgtaacataggttcagaggacctaggtcagttccatgcaagttttcttgttggcagttcatgctctgggagacactatgagcccaacttagtgccttctgtgtgttttcttgtgctgtttttttggaaaattcctgtgccatgtagtaatcaaaacagtaaatttacaggacaagaaagaatattaaaaactgaaaaggaaaaggtcaagtaaaacataaaggctataaaagaccatggatgccagcccttactattatacccagcaaaattttcaagcaccatagatggagaaaacaagatatttcacagcaatgttaaatttagataatatatatccacaaatatctatctatctatctatctatccaaaaatccaaccctacagaaggtattagaagaaaaaccaagaaggttaactacatccacaaaaaacacgagcaataaataatcccacaccagcaaaacccaaagaagggacacacacacacacacacacacacacacacacacacacacacacaactactactactactactaccaccaccaccaaaataacaagaattcacaatcttttgtcattgatatctctcaatatcagtgtattcaattccccaataaaaagaaacaggccaacagaatggatatgaaaacatgatctatccttctttctactgtatacaagaaatatacctcaacaccaagggtagacatatcagagtgaagggttggaaaagattttctatgcaaatagacatagaaagcaagctggtatctctaatctaatatctagcaaaatagacttccaaccaatttagtcaaaagagatggaggacatttcatactcatcaaaggaaaaattcaccaagagtacattgcaatttataacatctatgccacaagtgcaagggtacccaacccacatttgtaaaagaaagattactaaagcttacattacatgtcaaacaccacatattaattgtggaagacttcaatatctttccttcaccaatggataggtccagacaaaaactaagcagacattatgattcaaatgacctaatagaaatctgcagaacatttcacccaaatgaaaaagaataaaaagaatataccttcctcttagcacttcatggaaccttctccaaagttgaccacatacttgctcacaaagtctcaagagatacaagaaaattgaaataagcccctgtcttttatcagattaccatggattaaagctggatgtcaaaacaacagaaacaatagaaagcttacaaactcaaggatactgaacaactttctactgagtcaccactgggtcaagggagaaataaagaaagaaattaaagacttcccagaattcaatgaaaatgaatgcacaacatacccaaacttatgggacacaatgaacccctgaggagttaactacatgacatggagacttcttttctggccatctccattctggaagagtgtctgctatgatttctttgaatagtctccattccagcttcctcttctacaccacacctctatggctttggtctctacaaagtgtcacagatgtcctcagtgttgtcactgttctcaatttttctctattactgtttaaatgtaataaactctcagcattgtctccaaatgcttttttgtcttctacattatataatatgttggtaatgctttccactgggttttatcatttgattttctcagttgtttattttcaacattggccatttttgctccccccccccagaatctctgtctcgttgctgaacgtcctgtccaagttccagagttttccatccaagtcttcaagtgacttatttattttttgcatgtatgtatttaagttctctttgaggccactgagcatgttttgagcaaggttcaattgttttttaaaactaggttggatttttatacaacatttcaacagagttcaggacctttggattaagttaatgagatgttattatcctttctagagtcatattgcctggattactcatgttcctttgatggaatctgtacatctttcgagatgactgtctgtcttatatccaggtcttcccagtgagcagacttctcttgaggtctccattgcagtatcactcagagaacagactacagatcaccataaccacaacacaaaaacaaaccacatatagaaatgtaataaaagtcaattacaagtaacagaaaaggccaacaaccaacaaccactgaaaggaaaggggcaagatgatatagcataaattacaaaattaaaattaatgtttgtaaagatgataataacacaagaattaaagtaaggaggatggtgggaaatgggggaaaaagagaaatcaggttaaagtaaagacaaaagaaaacagcacaaagaagtgaaataaagagactgcaatttgattacaaaatacaaatgcttaagcaaattattcaagggaaagagaaatacaaatgaaaaatgtaaaaataaaaaaaataaaataaaactgggcctgttacttaggaaaatgaggcaagaatgatcataaatacaaggcttgcctggactatggagtgagtcaagggccagcctaggcatatttgtgataacctgtctccaaacaaaaaatgcaaacaaagttgagaaaaagccccagcgctgtatgccttacccagtctttaccaggccctaggctcagttctcacaaataaaaggtagacacacataaaaacaataaaaggaaaaaaagaagattgttaagctctgtttcacttgctccaatactggtttctctgtcttcccactctgtgtaggtcgttgtgtgttgactgatggtaggttggccggggctgtgttgtcaacaacaagcctccacttacctcacttgcttctcttcgtgtactgaaaccccttgcggaccccaatgaactctgtggcctgtgggcccgggcaggatcctatcacttcagagatacctgctcctccagtctcacaccagggacagccatggtccatgcagagaggtgtgcatgagaacacagaaaagtggaagcagtggagagccgagctcattctggaggagaggtgcagaactgaaggaacagtgtgtctcccgggctcggctttctcccacgctgcacgacaggaaactaccaagtgggcttcatagggttcactaaggaggctaagatgtggggtaaattagagtaactgctcccctgcagataaaaacacaaccgctaagtccacctcgccccctcgtggtgaaacgcataccctgttattcctgagacttccctcttaaaatgtttggtaatccaatgccaagtggtcagccttgatatcatacacatcccagcaacgttatatgtgccaaacaggatatatatatatatatattatatatatatatatatatatatgtttatgaacatatatttataaatatatgtgtctatttataatatattctaatatatattagagattgtgtgtgtgtaaaacacagaaatagaggccatcaatttgagagagaacaagggagggctaccgaggaaaggatcgagggcgaaaaaggaaagaggaaatcagtctaattatattttaatttcaaaaattaaaaaatcaaaaaagttatgggaagggagaatgctattttaagtaactatttttgcaataataatattacttacatttccatatctacccacttatggaattagcattattatagttattttgtttctagaagcaaaattctgttaggctttcagtaattctgatgtacccacaaatcattttcctttttaatggcatacatttctagacctgtctgtgatttgaaatatgtggtcactgagacattaaattttatctacaaaagttcttgatacatgaagaaacgaattgtgccgaagtagatgtaaaaataaaatagttggttgtgaagcaaattaaacatacagcatcatcaaggttaaagtttacacaaagtagacaatttgcacctcaggaactatttagcagtgtctggagacatacttgttatagtgacttggagtgtgtgagtgctactggcatctagtaggtagagtccagacaaggttagcaataccctggacagggaatgtgcgtgggaggggaacttggaggagtggatggggagaaagctgtagtagggatgtatccactgagagaagaagaaatataaatttaaaaatatatgtgtgtagatcttgcttggattctcttttaaacagctccacacttgtgagatgctgaggcatttgagctgattggatatgtaactttaaggacgtttttgacatgataatggtatcattatgtggataagagaagttatcatttcaaagttgatcctgcgggaggagggaagtggccgaagccacaggtggaacaggaatgacagagaaagtggaaataacaaagaatacagataagttcatcaaactatactaatactaaatagatttaatcttctatacccttaaggggaaaatgaggttcaaagctgactccaaagacgcattccagtgtagccggaaacacttcatttgcttgacttttgttgattcagagaagtgagaatggtgtctgtgaacttggcactgttgagctttatatgatgagatgttatccaggggatgggcaaaggaatcccatgtgagtatcccccccccaacactggggatatgcccacacttcagagtagcaatggagagagtgtaagtgagatgctgtggaagcaaatacagtgacctttacctcagttcggagaacaagatccacactgccctcatctgttagacatgggctaaaataaggcagtcagggttggaaatgccagaaacttaagaatgcaatagttatgctttctcaggatggtatagagaacatgtttggttcttaactgatggaaccaccacaaatatttatcactaattattcactgaaattttaaaggctcccaagtgatcccctcttaaaatttctgccctgataagaataaaggagaaatggacagtacataagaaatccttaagagtcctggcaaaatacatggggcaggacaacacaacgaaaaggaacatttttgtgaaggctctttgtcttttactcattacacaggcaacaaacaaaccttacttaatatatctcatctatttaaccacactctggacaaaaagtagaaatcagaaggattagttacatagaacctgaagtcacattgaaaatgggagtgtgataataaaactcctaagttaggggtgttttgggtgttttccaaatttggagctttttatttttcatcaacctgtggcagatgtctattttggtccatatgctacaaggaatgtctctacatcttcttgtaggtaccaggacattgccagggacttttaaaatagttttgctgggtggtgactgttttgtggttgaggtctggagtaatgaagagcacactgtgcatctccgagattcctgagtttgcatccgaattgtttctggcttcctcacccgtactcagtacagttggatttctcatgtgtctcaacaagaggagtacatgattttttcagcatgtggacacagcagtggtcatgaatggtggttgggagcagttttatcatgataagacacatgagaaaagtcgtcattcagtttcaggattctgaatgaaccatggctccccgtaatctaaactgagtttagaaaagaagtttgcaaaatttcaccctatcccagaaatgtactttcttaggtgtttctaatcccagctcccaaatgaaatgttgtatttctttaaataaattacaaaaaaaaccaaagtgacaaatgagaactttgttgatgccaatatatttctaaagtcaaaattacagtgataagttttctttttaaacactgggaaactatgtgaaagaagaaaggattttggaatacacgtaactaattcttttgatcttttgccatcatggaaaggatctcattgtaaacctcttgaggagcattcatggccctgagaaagtccagatgcttgtaacggggaacctccttatggtaaatgaggttttggagtttgggaagcagcatgctaacatctcggggatcagccgtgatgtcttggccaccattccacactgcaattggcacagtcatagctgacacgtcataatcaggaggtgtgctctaaaacatgacaggtaaaagacatggagtttaggcaaccataattaagaaacagtatgaattgtgtattagttccaaataaaatctaatgatctattcaaggaaatcacctttacccacagagcaaaacaaacatcatagtttggacaaatgtttctcaacttctaataggtctgtcaatctgctaggactcttgttaaaatgaagactgactcagcagatctgggagcaaagtcagagatctcacacttaggggatgttgatgctgttggttctaaactaagaactaaatggttggtctgtagatgaaaattcataccaattaaaaacctagattttagtttagctgaaggaagaggatttaactagattcttgggtttgtgtgtgtgatgggtacatgcaaacctctgtgcacatgtgcaagttagagtacagccttcatactggtccttggcatccatcagacagggtctctcccatccactgatgcatatgccaagccagctggccaacaagcttttggtaattctcctgtctctgcctccctcctaataggggcacactgagttattatagactaggcttacatagaaaacactgcacattgatctatcacattggcaaggatttgactagattatgactttggcagattgcctccaccactctgaaacatgatctcaaacagtcctggatcctgagtcatttgttttgactttgtattgccttctacagtatacattatattggcatatttttaaatgctatctgacctcattagaagctgctctccttggcaatctctcaattaggaacctcagcatgactctttcagtagtagagcttccctcagtcatttctgctagatgttgtaagtgcctgaattaatgatggttttctgctgctccctactcattctttcactcctcagcctcatctgaggggatgctttactctcctaaggactcttgatacagagctccatctggtactttaacaggatgtctcccactatttcctgctggttgtttcttaactgcaatttaatggtgttatattttgtttggcttctcaatcagcctgatccaggggtatctgctggatgtttttagtatcttatttaatgatgtttttctattgctctgttgattctttcttgtgcatctcactatctgcttgtaatatagttaatatactcactttctcaaagctgaaggcatggttattataaaccactctttggcctgtacaaaagaactgcctgtatcatggcatgaacagtggttcagttaataagctgtatctactgcacactcatataattttactaaatattgcttcaattcctgagaaaaagcattattgatctggctttttatttctagaaaaccactattaacacaatgagtttataaagatttacaaaacaaaaagtagtacaagagaggcatctccatgattcacatatccacacacactttacttaggtgcttttgtactttagatattatttcaaggatataaatccaatatccccaaagtttgtgtcttcacactttgtgaacaaaccaacttacatgtgcaaaacatttattacattattgttacagtaatttctgccttttcttacattccctcacatgttggctaaaatgtggagaatatctataatacacttagttttgcttacacactattgacgaaacaccttcttagatgtcatctctacttctaaattaacgtcactgatttcaatgacaattaaccagatgtatgattggctggaagaagggtagacttgatgattggttctcaggttcttgcttggctatctatgattgaatcctttggttaccagaatgagagtgaaataacactgtaaattcaaagcaagtctgaactttctgagtttgtctgagagtattctgaaaaatctcttttaaagacatcagataagtaacagagtggggcttttctttatatgtagaatcttgttatgaaaacatatacttttcagttgtgagtcagggcagttaatgaaaattaaggttattcagctacaacttgtggagaaaattgggttgtttaaataggaagagtggctcacaaactatttgacttgctcaaaattaatcaatgataatgagagattttgccctgagcaaagggttatatcctattagtaatttcgtactctgtgaattattgtgcaaatttgtattggccaccaattagatcaactccaggatttgggtcctttgtaccacagcaagtatgaagattacaacgcaccttcatgctcaaaattatttccaactctgacctgaaaacacaccacatttttttttctaattggaaatgtgttccataaaatcatttgtctggctgtccagaaggcgaggctaatgcatgagtaaaccagttagactcatgaatggacataactattaacttgcttcacccagttccacttcagaaagaagagcgtattgtggggaggctggactgtaaagcagggctgtgcaaagaccacgagctgttaatttatggaacatcttcacatgtgatctggcaagactctgaggtccatttccagagtagagtagtgggataacaagaaactggacaacaacattactttgaaaactggatacccaattatcatactttcctttccaaacttttatgtctctgtcttttaaattgtgaacaatttcattctcaagaaacttacctgattgtagtgtaactgattctggaatgggcttccccaattaaaggcttgaagtctcccagctctagcaacctaaagaaaatgtaaatgtaaaaattaagttaaaaattagttacaagtaattgaaattaattggataaaactcataaaccacctgaaaacaattcagcctccaaatacctcattttcatttttttaaaattagtgagaaaatattttctcattccaaataattactaaccatctaggatatgtgggttcaatacataacatatgtgagtgcaaatgcagctttgttccaacttcttttttgcatggcaaatcataaacataattatttctttgctactcaaagcacatgttttcataagattttcatgcacacaggttaagaggtttttggttttttttttttttcaggttgacgtacatagaagaattgcctgtcaggaacatcttaagaatgtgcttggggttaaggttcaatcccacaaaatgaatgctagcaacactgaaataatgatacctgggtccagtggaggatgttttgaacagatgttcctgctggattatcacctgggtactcatcaaaaggactctaggaatcaaacacacacacatacacataggcttagacatacttggtttctgaaaaacaatcagtagctaagttttctggttcaagcaagtgttgcagggtaacctctaacggaaggatgaacaatacagttgcatgacagcttagaatctacaaagcacaccactggttttaaccatgatgagcaaggtagctgatttaccagctctatatttttttcaagcagattttgagacccaaagaaataaatatcaggttcacatgaatagtgaccatcagtatgaggctagaaagttttacctagtttctgaacctaaattctcaactttctatttagtatcagtgtgcaagaggttaaatattatatacatgttgcttgctttgcatgattttaatttatattaaataattatacatatatacacacatatgtatataatagttaccatatatatttacttatagtattctatctagtccttaagtcacattgctcacacctgttagcattctcaagttccatttccagattgcatgggccaattcaatagtgggtcttagactgtggagtaagataaccatcaccaaagagactgagatctccctttatataagcagcatgcagaagacaagagctctatttttgtttcttttccatatctctagtttgctattatctttctctgaagactcttatagatatgaaaatgaatcaatttgtgtttttgtggagtaagcccaggattctcttttacattcctcatacataaagagaaacagcctcaaattgaaaagagcaagaaggggcccttaccaccgtaagtaaaacctaaaggaaaattataaacaaatgtgaatgtatttatcatcagcactgagaaagacaactaaaactccttagtctccatggaggtagtagctttgttttcactactgtgttcccaatgagtacagatattagtatgttacatctgatagtagccgtgttttaactactatgttctcaattagtgcagaaattagtaagctacctctttaacttaaaattcattttttaggagttcaaagatataaattagagtcaagatcaccccgtaattccagctacttgagaggctgaattaagaggatatagccctacattggctatagaatgagtgactcggaaatttagcaagatgctgtctcacaaaaaatgttatttaaaaatactgaaaatatatctcataagtatagcatggtcttaaaattcctaaggtctgtgcttaataacacaaaacaaaaccacaaaaacaaaacgaatgatcagccagaagaagtgtgtgtatgtataatagtaatagtaatatgtatactatgatcattgttatgtgctttatgctatgttctgttctatttgtattaaataccttaggtgatttgaactttacaatagcatggtgtgtgtgtgtgtgtgtgtgtgtgtgtgtgtgtgtgtgtgtgtaaaccactacaggagtttaagtcagttccaaaagtagaatttaaattaggctgacttgaatccatatgtttaaggccctcatgatattggaatttctcatataagccttgaaactccaactccaggggtaaaaatgcagagcaagatatggataacctgtttcatagctacaccgaaatgtgttttacaaatgaatggctatgactagcagtattaaaagacttcatggcatttacttgatgactatgcattgttcctcagaagagcctggcattaaggttcattcccttctgtcacagaagctaaatgccacgctagccaaaagtcagtcatgttttgaatgggaacaagagctgaaattggaatgagcagtagcttctgacttctctggactctaccacaatgctgtgggcacagttctgaggtgatgatgaaaaaacaatcaaaagtgtttgggaagagtgtcttgaataatgcaggccacaaagcatacataccacattcaagttctttctgtcaaacccacacataatgaataaagcgttgctgctgagaccaaccatcagcttccgagaacacacttctgtaccgggaaattgatcaaagaaggtgtgtggcatgaacattttgtcaccaaatataatctgaaaaatgagagcatcattagaacatggcagccgccaagctgtagaaagccctcttcattgttgcaaacactcattcaggtagtgattatgcttgtttttctttagttctataagtagttttagaaatttcctcttctttagaccagtatttctcattatgcacaaaaacccaactccaaacagataaaagacctaagtgtgaaaccccaaacagctaagcttctagaagaaagcattgtcagtaccataaatgatatagaaatagtaaaggacattctgaatgagactctcttagcctaagaattaaggctaacagttgacaagtgggacctcataaaaccaaaaagctgcacagcaaaggaaacaaccaattagtcaaagaggagggccacacaatgggaaataatctttgctagttatacctctggcagagggttaatatccagaatatataaaagacaaccaaaccaaaccaaaaagaaacccattcaaaaaaaattgacccagaacatgagtagagagttcgtaaaaataaacaaacaacacatagtggctaagaaatatcacagaaagttaattgtctctaacaattaggttaatgaaaatcaaaacaactataagattttatcttatcactgtcagagtggcaaaggtcaacaaagcaacacataataataataattattgtcggtagaatgcagggaaagggagctctacacttcctgttgagggcattagaaacttgtgcagccacttggaaatcagtgtggagaattctcaacaaactaaaactaaatctacctatctatatcactcattggcatatgcacacaggactccatgtcatacttctcagatgctattataatacatgaattttgtggaaatatacagacatatatatagtttaaatgaaaatttctcatctggactgataacactctctccaagagccaaagaccatctaatgaaaaccgtaacactatgcatgagaaaccctcatttgattggttgaagttgttgatcagggttgtccaagagacttccaaaacagtacagactattgctattgtcattgttcgctcccaggatgtaaacgacaagactcaactgttgaagacatgaagcaattcacatataggaccagaagcccatgggctgaaactaacaggaatggctcctccctaagaaccgggagcaactaatagttctaatcagctatgactcctacgaaccacatcaatgagcagtatggcaagataaccctaaggttgcatggtcacacatgtactttgattgcaaccaacaactttctaattggaattcctcaataagaggaattcatgcagatatagaaaacctatctaactccccagagataggaaagtcatggacttcggataatctacaaccacaactttactaaaccagcataaccccaaactacattctaaaattttgtctttatgtccacaaataagtgtagttctgacccctcgtaaaggaaattttcgttgcaacaggcaagagaccattatagaaaaccacaatcagtcaaactgcagacttgtggagccaaatcccaactgatgcatgtacaaaacaccccacaccaagggtttagagagcattgtgtaagagggatggaaagactgtaagagccaaattgacagtgagtttgctgtgatactgtttgcctttgtaatgccagaagctacatccacaaaatctcaccaacgttattgcctaaacatgagctgaacaaggatgacaacatttgacaggtgtggacatgaggaatgaccatgaggcctcaatctgacacaaggaactataggcaaatcagaaaagctgagaactggagtgggaactggagtgcttttttagggaagcagaaaccaattgtttatccaataccaaatggtcaatcctgaaaatatatacacaagtttcactatacagaatcaggaggctatattcataatatatgtatctatgcatgtagcaacagttaatgaataaagaggctatgaatttgaaagatatcaaggaaggatacatgggagtgtttggagggagcagaggggaaatgttattacaatatcaaatattaaataaaatattcattatgtgtatagaggcatgtgcggtacatgtgtgtcacaggaagtgtgtagagcttagtgagcaacctgtaggagttcattgctctctcctcccactaagtgtgcctcagtaattgaatttaggttgtcagacttggcaatcagctgtatccattgagctattcccccccctctttctctcatttaattctctcaatgaaattgtgaaatggaaagtgcagatacaacattcggtgtgtattattgcaattgagaactgcatagcctcttggagcaatataagacacaaagaattataatccagctggagtaataaaagctatggaatcaaaccatgaaataataagacagattgtcataattacatatcaacatgtgttatctgagtaataaattatgagatcagaggagaaaatagggactcagatatctttaggaaaaatttttagactcaattgtgttgagctttgagacattttgctttcttaattttatacccaagaaaacatggctagggaatagtgtttcagtaattagtaatgaagttattcctgtaattctgatccatgcctgtgatttaatgtccacaacttctcctttcaatttttctgctcttgctaactgattatctgagcacaagtggaaacaagaggctcagtgcagcaggaaatggccacagtcattttactgtcacaggttttgcagaaaagttttgttaataattttggctataggcagtgattttgggtttaggtatgcatgctaatttagagtgaaagttaatgaacaatatactgaagggaaagatacaattactgtacagtatttacagcctcaggctaaatcattcttctaaaggaaattgtgcaaatgtgcaggtgtgcctgcatgtgttggcatgagtacaggaaaagtaggccattaaatttttgactaagtaagtgatattattacattcctgtgtgggcttgttcaacaaggcactaaatattcatggtctattcatttctatattactgtcctgtgaaattcccatttcttgggacaagaactcatagacagcccaagagcatttacttggaggttacacagtatttactttttgctcattcattgatttctttgctttatttttcccctccccttcatcttccttcttttcctcctcttgcaagtttctatagccctactaggattcttatttgattatttttttctagtcatttatcaccccattctctattgcaggagtgaagctgctaccttgacacaggtgtgtagaatatttgtagaaagcaaaacactcatagcattgacaacccactgtaagttaatgaaaaccaaaggaatagatggggatttcaaaggcaagagggtcgataattttcatgccagagagagataatataaacatgcaaactttaggtttgttgatatgaatatgttcatccctaagaacatttatttattttgaacactttggaatccaaaggcaattggatacctaaaatagaatcacatacctttaaaagatacccaggaatacgtgaaagttctttcaaagggctttgtgcatatgtgagagtagcaactggagctaatgcataaaatgtcttgattctattagccagtgtgggattggtagaaaaggcaataaaacctgaaatagaacagaccatcagtgacgaagctgtgtgcatgtgtgttctgttctgttttcacaagtgtgatgttattttggacttgctgcaaatgccgtgtgaggcaagctgtcaaaatggcacatcagtttgttgggatatgtatgagcacagtgatgactctttaaaatagccactaaagaacaagaagagttgagttcagtcttcagttaactcaagatagaggcagagtagaataattcagtgtcaagacgagcagttttactcatctcaatatcattcaataattttataacatatttgtgagaaaacactaagttagatgaagtgtgtgtcacagaacgttaatgttgtgaaagctccctatagccaaacacagttcttgtcagatgctgctaatctcagcactctggtggctgagtcaagaaggtcaggagtttgaagttagcttgagctacacaggacagtcttgtttcaaaaagccaccatctgcaacaacaaagatgcctatgacttctaggaaggtaattccaacaactccctctcagacatcatttcacatagtattttgataagtaggaaacctgccctccctttggattccagaattctggctgcttgcatatcattatcactacctctaactttgtttcctttgtcacagaactctcctcttgaaaatgaagggataactctgttgtgctgagacctattctctcggctgtctgaattgattccttgggattttaacttagtctcatggactgatgcctcctgtcgagtgtttttagtccagtgttctttctttaagttcagatagtttattactaatccttgacatctttacccaaatctttaatagatgacagagtgttcccaaactgagttcctgatgtccttatatatcagcttttcttacagacttccttccatatgactcttctatgtcattacatgactcttctgtgtctactcagagagtgtttgcagaattttttctgttgaaaatgaattcagaagccctctgagaatcgctaaaatcctccatgagttataatttcccataacattaccatggtttgttgaactccatttacttttaatgttacttttctgtccccctccatataagtaatataaaggtacagactttaacttatcttctttggtatattatttggacaaataatttggtttccataaaaatgatgaaagaaaaaaacaaattcagcctggatgctggaacatgctgccgtgagagtcagttgacctggactggtatctgaaccataactttggactattcatagaggctcatgctacttgcctgagttatttatctcactgcttgatttatccatctctagggtatgaggaataattgtcctcatgttactgtattgccatggacatgacattttataaagttgcatagcaatggttatgctattgggcagtggtttagaaactgttcccagtctcagtgcttttacttaccaatagtggtgccctgagaataaccaacatagtgcaacttctcttgcccagttttctgtacaatgaagtctattgtggctggaaggtcatatttagccatttcatcaaagctgtaagaaaaagtaaaaccaacaaaacatattttcttgttatgctttctaaaattcaagcatatttattgagaacactctatttcttctataaagcagaaaaactagacactttaattattgcagttacaaacctgtagtcagcgtcagatgcctttgaggggatggaggttgcttgtaagcaaaggccatatttttcaaacaatgcataatggctacaatctaatctattgaagatagtctcaatgggtgggaattattttcatacataaagtggaataccagatttaacaagcacttgcattctacattatgattccatataacatgagtcccatcctgtagtacattcttcttaaatcagctattacaatagaaaaatgagaaaactcttgaattgaacaatttttagtggcttcttgttgtgcacagaatgaatttcaacactctctctagatccagttcgtgtcaacattaatagtgttctcttgtgacactgtctctctcttccccactacaccagatggtacacatgggcttcctatcagttctcaaaaccataaaatcatccttgtacctcagcagcatcagcctgatgctcttctgccatgcatctccattagtcatttttaactgggacacaagaaggaattggatgcctttgataacattcctgtgtccaaacttggggcttttcatgccgatgcaagctgctgtcccttccttccagttctgacacatccccaggcttctggtttctccccatggagctttctagcaacagggagtttgccttgcatcctccctttttgctgtattgttaattttatttggaaaagaatttttaggcatctcttgatcttgggtctagagatgatagccaatttgaaggaaaactaccattggaatgaggtgtatagaagattcaaatgttgaattaaaaagataggatttttttttttttacctcctacctggagtgtaattggctccaatgagaaagtgagaatggccatgcttctagagttcaagtacgtactcattttaaattatcctttctttacctgaaagcccagaattcaactgagttgggtgaataatataaatttctcctggaccatggattcccgcggctgttccccagccacacatcataaccagcgtctgccaaaatgaaggccaggctgttgtttggcagatttgccgtccagtttgtggctgatgtaagcaaaccatgctgcaaaaacaccacaggtctcttgcctaaggaaaaagattattcaaacattataaagttattccttatggtagttagacatgtggtcaaattgggtatgtttattttgttatgtttgtatttgaaatctaaaatatcttttctggagtgtgtctggcatgccaaaattaatcaaattgtacactttatttatttatttatttattatttttatgcatttgtgtaagcctatatgaatttatgtgtgccacatgttttcagaagcctccagtggtcagaagatagcatccaatctcctggaactggaattatgtatagttgtgagcagccagcttgtgcgtactgagaattgaacccaggtctaagcaagagcaactagggttcttaaccactgagactctggcacataaattttatttttatttagtgcatttgtatttatcaacacaggaccttgcatatgctatgcaaatgtacagttgaactatatcctcatcttatattgtgtacatgaaatgtatttactcttacttgtcagttatatgtaaataaagatattaaatgataatctaaggaaattaagcattgagtaaatgtaggttaagagtagtaaagttatgtttcattatttttctgtagtgagaaaaagatgaaaacctatcaatgttatcaaaataaaatgacctttgtctatttaggaaatagacctttagctacttccagcctcccctctacaatacaaactggctaactctttccatgcactggatttcagctactgtgttgaaagaaattgtccctgatttctttaactgggttagaggcctttgatagtccttattttttttaatcatgattgctttctcattcctttgtctcagtagacttgattgctgcttattgaagattggaaatacaactttgcattgcatacagagtaaactagactcatttcattgttagaaagaaatgaagggaaaaacaaagaaaagtgtgggaacagatggagagatggatgaagggaagggaaaaaggcaaggaagaaaagaagcaatgaggaacaggaagaaagtttatacctaaattctctgaatgttttttcccataaggaattctgaagacttccagaatgtagccatctctagttataacttgatattcttcacttggatatccccagaaatttatcatcagattctgaggaagaaattttaaaaacaaaatttttatgttttaattaatttaaaatgcatctaacaggtatttctagtgaattttaacttttaactaaaagtttagacctatcatggctctcatcccagtaatctcccttagtaactcacaatattcatgtttgcttcaaggctctcaggagtcagttttctagatgagctatgtgtgcctccaaatgcagatatcacacttgttactgtcaacagcagccacatcttggactgccctgaaacaaaaggagaagctatattatagttaacctacatgcttccataacattcagagcttgtgactgttttacctccaaaagtattgtgggattggctgagtttgactatattctgttgagcataagccttggtaatatggacattggcaaatttaatgtttagcatactttcacttcaattgtttctttgtgtgtgtgtgcgggcgtgtgtgtgtgtgtgtgtgtgtgtgtgtgtgtgtgtgtgtgtgtgtgtgtgttgtgtgtgtgtgtgtgtctggagtttgttgaataagttgggtcaatggtcagagagctccacctgtctcagctaccctagctctggaattactagtatgcatcaccatgcccagctattttactgagttctggggatagagttcaggttcttaaccatgcatggcaagtatttcaccagctgaggcatccactcagtcctgattcttttttttttttaatctccaactcaggaattttaatcaggaattttaatcctccatctacaggtgaagcatagttttattattctgtatggttaagaccaaactttctttttgagcactgagtgggactgaaggctatatatatgggcatttgatgtttttacatcaaatttaacataatttgcattcaaagctatcattgtggggttggagagatggcttagaggatgacctggtatttgattctcagaacccactcccaagagctgtcctctgaaatccacatgtgctctgtacagtcacacatatgctgaaataaatgaaactgtcattatgttaagacaattaataatagtcactttataactatttagaggtttgaaaacactgtgaatttgaaaggtaacatcaccatctcacaatgatgtcacaataagaataatgcatgggtgtaattctagaaaactataggtcttttaattttctactgagattattactgtgaaattatgtaagtaagagtgattataaaccagtagtgtattatatggctgaatatctttttcagaaaaaggaatttactattattatttttaagaaaactaagggtgtactagttgaatcttctcatatttaagcataaaactaaaaatttgttttggaaaataatgacttcacaaagactgaacctatgctactatctaaataattgacctgtcatataacttgctttcaaagttgttgtcaattatgtcattgtaaagcaatgcaggatggtagtaaatgaatgaaaaaatttagactgaaaatatcccaactaatgaacctatgttactatagataaccactcataaaccttggaaagattctagtttcttgtgtttttatattttgattactatctcaaaggataaactttgattttggaaaggaacattacaataactccttttgatcaagcaattgtaattgtcatttatcctttagtatggatgatatttggcattagactctcaatgtacttcaatgttgtaagaaccaactacgaattttagaatattcaatagtaagcttaagaaaaaaacccaaagtgagaagtggtatttttctcttttcaagagatgccacatggaggttaattttaaataaagatctttttagtgtgtctgaagtcattcaggttttttttttcccttttggccagtactgtatgctagaagcaaatttggagatcatatacaaaaagattttaagggtgaacagtgaaggatttgtaaaatttggatcatttgtttcaaatggtgttctttgaaagaggatcaggtctctgttgtggggtatttgtacactgtgtgaaaatgtattgctgagattggtgtaatcaaaagctgaacagtcaatagctaggcaggatgtatagctgggacctccagaagagagagagagagagagagagagagagagagagagagagagagagagagagactgggaataagaatctatgtgtaaaagaaatgccaagagataccaggagacatgcatggaacaagtcggataacagaaatggaaaagagataaaaaagccatgtggtagaacatagattaatattaacaaattaagttataagagttagttggggccaagcctaggctaaggcctatctttcataattaataaataagaagtctccatgttattatttgcagggtggtagtgctaatgaaccagtactattacaggtctcagttgctgtcaatatttcagtaaacactagtactgaacacattttgcaaagtccccaacagtcatggtgttgaaccagagattccaagacctaaatctaattatctggtctgagaattcagccacttagcctgaaattgggtataacgatgtctttggaaatggatttaactaaacattttctgtataatgaaaattcttgaaagaataaactaatttataaagactaactgccactttaacacacaagctagatgattgtcgtgctattaaagaatttgtggtttctttttagcctttgttgtctcaattaagtaatctgtctttctaaagtgaggtcatttaaccaatggcttaagttattgtatatcccaataacaaaagtatacaagagcccagcagttgtggcacatgcctttaatcccagcaatcgggaggcagaggcaggccgatctccgtgagtttgaggccagcctggtctacagagcgagtgccatgagaggctccaaagatacacagagaaacccagtcttgaaaaaccaaaaaaaaaaaaaatgtatacaagataggctctgaaatacttgaggcatgattaaattttcaaaatatctgataccaaattcccagataatatcagtaactgtcatgtgtccaatagtatgcaagtgagttattttcacagtttttcccttttctgtaaaatagtgctaacaagagtatatttctttgtgctccgggacattcattatgattaagcaggttagcataattattattgctataattataaatatttaatgttctaacatttaattgaaacaccccttttaagtacttagcatcatgttctttactttgccgatgggcaaagaaagacccaacatgtatgtggaaagcacccccacctgtaattaaaactgtgctgactgtttccaaagactgtcttctccaatactttactgcctcactagaatgaccttaagtcacatatataagcagtgaattggggacaattcaccaaagcattctataatgcaaaccaaactttgttttcttgggttttcatttgaagacatatattagtacattgttggccaacattactaataatggttaactcaataccagttggtggtaaatgttatgctactcgatatcaaaaattatgctttctgtgatgctaaagaggctgatctcaaagggataacctgaaagaatgcactcacagtagatatttgtgacactaatagataaattcatcaattagtaattaagaattgtatttatacataaaaaagaaaaatgtaagccaaattccaaaagaataatacataaattaaacagacacttttatatgtgataattgaagtaaagaaaaaaagaccaggatttcaattcattctgatcgtcaaacgtacttacagtgtcctcacaaacaggattgtgcttctctgcttgcctactttagccaaagggcaatttctccttatatacaaaacatcaacaatggtctgaattgattgttcattctttggttaaattatcataggtccttcatatctggacatcatcatggatattaaaggacaacccttaaaatcaaacattgcagctgtgtgcacagagcgttacctcccctcattaacctttaactaatgtaaacattggtcaaaggattagtgagtataagtgatttagaaaacaataaaaatgataaccgattagagataaacctaagcttaaatatgactctggtatattgaggagctttgatggaaatcaatttgaaaatgaagttatgtagagttctaactgaaacactgaaatgtcaacaaagtcacatttctgttgaatgtgtcctgcctccctcataatcctgtctatcctccattctcttttattccccttccccaaagactcctgctagacccctttgtcacttggatcattgccctttcactttcatatcatgggtcatgcactttggtatgcctacacagctttgcctatctatataaaatccaggaaacccaggagtaaggaaacattccattaggctctgatgactataattcatttaatatgattatttctggttaaatctattttgttgaaaatgcacacaactcattcttcttatgacaaccatgttctatcgtgtatgtattgtcattaactaagaaaactgagaaatattataatcatatttaaattaaaaatttggagagaccttaaaatcataatttaatgatgacttaattgttaatcgctattacctgaaggcattgtgtaaacacacacaagcaaactcaaaaagagcagacatagagaaatagtaaaatttgcatttcaccaattttacacacacacacaaaaatgccaaatgtgctttgttaaacattttacggttgaaattgccatctctatatgactttgacaatgagtgtatacacagtactaccctcgaaggacaatacaatattgaaacaatattttacacttaaaaatatctcaaatgattttatacatataatagatgtttacgtgtatattatatatgcattaagcattcaaagtgtataaattatgctttcagtaggggtgggtaaatttcatgatgtgtctaagatacttaagtcatttgcttattataatatacaaagtttataatagtttcttagcctaggtataaattgcatctcatgactcaaagaaacataccaatactgaaatccttaatttgtggcagtagtagaaattggatgacgcttgatgagaaggtgataaaaatgaaagaggaagggatccagagtatgtggggagtcagaggaggaaaaagagtatttgtctcatggtaatgctgtgtctaatatgtacagattcaatgtatttttattccaaaccagcatgtgtggtgaagtgaagcactacttcatctgttaatatctttttgcaatccatgttgctctttaataacagtttagttctgtttatagatgaattttatggatgtcattaaattagacttagttacacctgccttttctgatattggacatagctcaacatggactagaacaagaaaagtttcaggaatatgacctggatattttaatgtaaacttgatataagctagagtaatttgggaagagagattcagaaaatgtatggcctgtagacaagtgtgtagaatattttcttaattagtggttgatgtgggggcacacatgggaggtacaagtcctggtcaggtggacctttgggggagaagaaagcaggcagtgcaaacagtgggagcaagccatggcacttcttcatgacccctccgttagtctgctgcctcagagtttctgctttgacttccctggatgatggactataagatataagatgaagtgaaccaactttgtcctgaagttgtcacagcaatggaaactctcactaacacagaagtcaggatgtctgatttaaatacagtatgtattacaatacccatatagtgccagtgaacagtttatgtgaagacaaataagaaacacatggcttgtattttttctctaatgtgatgatatatcctcagttttacaatatcttggtaggctatagagtgtggatttgggaatgctgtggagatttggattcttcaggttggtataagccaagcagtttcgcttgcctttggggaactgcacgtcaaagttcttatcattggaaaaatgaaacaaatgaagctggggacagtgggtgaggtcacatcccttcactcagaacttattcagatctctaatgttccacatccatctgacagatgtctgtttattctagcatgtgtaaagaatccataaggaaataagcattcataagtgttgcttaatcctaccggtgacctgagttacaggtggtcataagtgtaccctgctcctcagagatggtaagttttctttggggtgattaaagaagactccctatgtttaaccccttttgtgaaacgtcaacaattgcaagcatggtaagcaatgaagcaagaacgtgactaaaaggacttgacaggctgggcatgaggaaggtcctgtgatgcccacaaacagctgctctttctgctcaaaaacaggaaaggcactcagcctgtttctctgagtcaaggagcatgaacctttcagcttgggtggttggggccattaggaatccagaacattgcacctcacccacgctacacagaagctgcatttagttatatcctggtggtttaaacaggtcaaagtttgagaagttctctcttaggaattcatttatcgctttctcccactatgtcatcaaccatgacattaactcatttgaaaagccacacgtcagccatagagagcaagccaggtagcacaattacccccaaagcctctgattccttcttctgccttgacttcctgtcttggcttctattaatgatggactatgattggagatgtaagccaaatgaaccattttctcccatgtcgctctttgctgccatgtttatcacagtaaagaaatcacactaggacaataatcatgtgtgtcccaatgccttacttcttaacactttgccatggatgtgttttgaatatctcccaaattagacagctcttttttcaatagttaaaggaaaaaacagaaatgtatttggatcttaacttaatcaaaagaaaaacagaaaaactgctttcaaaacctgactttgttcatgtttgcaacatttgttagtacacaactccatttacaacgaacagcaaaaacgtctgataaaattagttacagttcatagcaaatgcttatatttacagttttaacaaaaatacatattgattaatcatcccttagtaattgcggaagaatgctctgatgtttaccataatcaaaactcagggcactgggagccaagaaacattacaccacatgacagatcacaggcatgccaagctctgaaaaattttaggaccatgtccatcttgagagcttttcatttgtttggtttcttagcaaatgtcagagatcactgtaatccaagccactgttccttgtagaaaagatcttccaaagtacatattcacacagatatttatagagaggaaagaacaaggagaactaaactttcagttacactccagaacacctagagcctttacattggtgacagtgagtatgaagttgtggtatttcaaacttcttaaaatttcaactcataattaacatattcatgagtgaagttcattctattctaggcacagcacaactttcattgaaattcatcaccatgatctattgtactgaaggtattttactagagtgtatctttcttcttttctccattgtgctttgatatgaatgatttatggggtaaaaaactagaacagaacacagagaggggtctacagtttctgggctccatatcagtgggagagagaataatatttgttgaaaatatttcattaccagtatttgtacttttctaaaggtatgtctacaaagaaaattccaaaactgttagtggaatatctctgtgttgatatttctcaaaaaaaaaaaaggctgggttggcagtaatgactagataaagtccctctgagccacaagctctatatcacatgactgttccacccactttgcactcacataccctatgttatggtctgtctatcactcttcttagctttattctgttgtagtcaagttgtaaactgttttgggttaacttgtgtaatagcttcattgaaaaagccagataatgattttgattaagttaagagaagatccaaatacatttccatgatatttttcaggaagtggcagacaattatttaagtttcatgaaaagctaaggggcagaaaggtagttttctgaacagtttgggcaattactttgaatttcatttaagctgtcttttgaaaagcatagagatatttctgagtcttataggatgacatgaccaactttcaagtaaggaaggtgacagatagacatgatgcatatccaataacctgagtttacatggagacatgtactgtatcaagctaatacctacttcccagcaggtttaaatgtggtggctactgaaaacaatttgccttgttcatgtaattggaaacatattttgtttgttgaaacccaaagcgaagaaccctgaagtcaatatgaatgttgtaagttattgttattaatcaacacactttaaagattcaccactattagtttcactcattctttcccaattgttgcatgtatgataatctgaaatttctctttacaaagaaattgttactatactctctaaaggcagtttactgaagaatcacaaaagtgtccagacgacccaactaatgaaagtcaatgtgttttttcttccacatttagagtgagattatttcctattggggctataaatgggaagtgcatgaagttgtgagtggtgatggttacattcttccaatttaccggattccatgcgggaagaatgagaccatgaattcatgtaatggtgagtgacaacaagtactgagatttaaatgcattctgtgaaaatccctccatcagttacctctaataagaagcttccaatcctccctggattccacatgcaaatcaggagtatgtgtgatacctgccatggtagttcctattactacacaaataaacaccatctgtctcataaatttagattttgcagaggataaaagctcagaatccctgcctaaaaagccaagaacctctaagcccactgactctgtaatgcttgagttgctgctgtgagagttcacaatatccttctaggtgatgattgctgctcctggttcattctgactatattttagatgtcccacagatgatattcatgttcaatgacttattgttgtagttatttattatataattttatattgtcttttgccttacatgagtttaaactttttactagaaaataataaagcttgaaaatttcataaattaaaaaccttagggaaattcatatatattcaataaggagcaggaagaaaatgggatctaatgagcacagtgattattttactctgaacaaactgcatgatatttatgtatgaggataaccagctgttaacacttctatttgatttacatcttcattatggcaaacacgccaacaaacaaaaaacaagccttgttgcctttagtcacagcactagggaggcagaagcaggtggatctgtgtgagtgtgaggtcaccagggttggcataacaagttccaggccattcaggcttatacatggagacagtatcacgaaacaaaaaacaaataaacaaaaacctggatccaacagtactatgatgagtgaaaatattaccaagtgtttcctaggaaggaaatagatgtcaaagaggataatagaggatgcaaatatgagaatgctgcaatgatatacatgcataaaatataatgagctccattattttgtgttcacaaaaatcagttataaataacaaatatgttttcttttcagccccaaagagagtagtgtatttgcagcgtggcttgactctatctgcctctgcttggattcttgggcttccttctggcagatgataattttgatgtgtggttggggaacagcagaggcaataattatgccatgaaacatgtgtacctagacccaaattgtaaagcattctgggattttaggtaagaggaaagatcttttatcttggtatgttttccttaaagctatgtttagcacttataagttatcataaatttactcatcttgactaaaataacttcattaaaatgtcatcagaataatattttgaataatatatgatttacttttagtgtgtgtgtctatgggtctgtgtgtatgtgtatgtatgtgtgtatgcatatgtgtgtgcatgtagtatgtgtgtgtatgtgtatgtatgtgtgtatgtgcgtgtatgtgtgtgtgtatgtgtatggatgtgtgtgtatgtgtgtgtgtgtgtgtatggatgtgtgtgtgtatgtgtgttgtatgtatttatatatgtgtgtgtgtgtatacggagcccattggtcccaggatttgtatccatcgtcctagagctggagtttagatgtctgtgagatgttattgagtcaagtaagtctcctgaagcatggagacatctccagctccttgaatgaatgatattttaaaaggttgataggtaaatgtttgcctaaaattttgtattattaatttaaagataaaagcaaattttaaatatcatttctatatatctccttacttgtaactactaatcaatttgctattttgtctccttttaggaaatatttcattgaggtatatttgaatagataaagcattcatattttgtgtatacaacttgatgagcatatgcttaacttctaatcatctatattttttattttttaatttgatgaggcttttatttttatgaaaacaaaaacagggaaggaataaaaggaacaaaatgtacaaggttcatttctatcacaaaatgtcagaaaatcattgagaaacttcttcctgtttccatttttgaagatactctaactttattgatcattgtaacatgtcttacacacaaataaaaactagacataaatatgtcatgggaatattatctctcatattatctaataaattcagatgtagaacatatgcaattagagatatagtaactcacttaattagctctgatccttgactctgttcaaagggaccaaacaaaagatcatttcaaagcattgtgagcattgtaggaaatgggtgtgtgtgatggggagcatgaagcagagtgtgcagtaggtatttgtagattagtgttatctcagtacccatgcatctctttggaaatttttttcaagtcagggtttcccctgaaaagataatgatcaattattataattaaccaaactccttaatttctgttttatacagttttgatgaacaaataaaatttgacattccagccatcattgatttcattgtgaacaagacaggacaaaaacaaatctactatgttggccattcccagggcacccttcttggtatgctgagagagactaaaatctgcccatcttgtaatttttaattgtaaaccacataagcattctttaaaaataacttcatttatagaaatgacattttgtcagtatttacaaacattcagactagccaaaaaatatattcatttgttgcagtggtttaatttgctaacagacagccatgtttgttgttgtttggcacagagtattgctgcctaccccggctgggttccaccatgcaagcctctgactccacttctcaaatggttgattacaggcatggctgacagcacttggctaatcttcaaaataacagatagaataatagatacattcattatttgtttttttaaaataatcatcatttcaaagaaatgagatatgtgaacaatgcaaaaatgtgatagagtcacttgggattcttagcactttccaaaactaagcttaacacattgttttttgatatccttaactgatttctgaggccccagtgagcatccacagagctttgagtagtattttaatgggataatctgaggcatgctaatttacataatgtgaatacaagaaaaaatgcatgcttccaaaccttttactccctggaaaaacatttctaaacagtttgcatgcaactggtttgaaaatagccttttactgcttgggtactttgctggcagttagctaccatgcacatagtacactaaggaaatttacttctcctgaaactctcagtcttttgaggaaagataagggatcaatagcacaggtcctcatatttactgggccacatgttttctcttgaggatgtctttggatgatatacattctatgatgctaagtggtatctagagtgtctactaaatagatgggacttctaacatcatgttagtaatgttccctaagatcaaagaaatccttaaggaaaaactagagcaaaaatgaaataatatttaccaaacgttttccaagtagtcttaaactataatttgttattgtgtttgtgtacacacacaaggcctgggattggaggaccagacaagtagaagctataaatatcattctccagccatagaagagggaatatccaactattagagaagattttaatgataaaataaaaattaatttaaattttggtgcccattaaattttgatgtctttttctaaagataggctattcagccctgataaccaataatctaaatgtgaatgtgtatacaagtcttccatgcaaatcactttcagtatgaccagaaggaaaatacttaaaagatcaatgtaacagaaatgtaacattctagattccaaaattgtaagagagattaattaacaatcaggaaatacttgatttttctacatttgtcactttttaatttttacgtttttaatttttatttatttattttgttaatgaaatgtattcatttattttacatcacagccacagttttctgtccttcctctactctcattcccatcccccacccaaccctccctactcctgtttctgaccagagagcagaaggattcccatgggtgtcaacaaagcataacatatcaagttgaggaaggactaagctcctctacttgtattgaggcttagcaaggaaacccagtatgaggaataggttcctggtaaccagggtcttcacaagggaacccacagaaacaactaacctgggctcataggagttcaaagactctggatggacagcagggagcctgcatgagtttgacctaggtcctctgcatatgtgtgccagctgtgcagcttgatctacttgtgagacccctagttgtgggtgcagggcctgtccctaatgctctggctaattagtcatttttttttgtaatatagcatactaagttatggaatatctggttaaacaaacaaaacctttcacagtgacagttaaaatgaggtccacatcaaatgtagcttaaagaaagtaacctattggtgtgcttccaggtgaatcagaatttcaagcaaagtttcacaaatatgacacagaatacacatagagtctctgttgtgattaaaaatgacacagtacttggaaccaagagagaataggaaaaatgtaatctcttctcttgttttttttcagcttatggggcatttgcaacaaacccacagctggcccagaaaattaaagccaaccttgccctggcccctgttgtgactaccaggtatctgtcaggtgccttttcacaattgcatacgttgacccaacagtgatcaagttttgtaatactttctaggacccctcagaagtagaagttaggtgcagttttcaagaatacaaatggtacccagttaagaccagagatgctgagacaataccatgttgcctctctgcttggagtctttgtaaccacacagcccccccacagctggtactgtatgtcacaggttgccaggtcttgttatccatcagttgaccaaagttcttcttttttttcttcttacccatctacttttcttatctactgaaacctttattaatagattttatcatacaaatgtgcaatctgcatttctttttaaagttttctatcatgtctggttttcaactgaaattacaatagagtgaatgggattatccccttttatcttctctttcttcctatagacgtgactgtagcattcacttttccctgttttttagaactaattttaatcccatcttgtacaaagtgttgtaaatatattaattataaatgctttagtttgcagaaaatctttagctagcaaagttggatagacgggtttgcattataaacagtctactgatcacatatcttttgtattcttgctagagtttgtctctttaaaaatagtgagccatctaactgacattgagttataatttgtttggcttttacttgcaataatgacaaatgactcagcatcatttcatttattcagaaagtttcatctgactcttcttaactaatacatttctgattttttgttctatgcatttacatagatacattctctaaagcagataaaactgccagctgttcttttctcatacatgtctatgattaacagcctctactcaggaatattaagaacagagaaaaccactttattaatcttacttggaactctcttgtcctagtttagttgcagatcagataggggaacatttagcctttcaaaacctacatgtcaactctaaagttcaaaagggtgttttctctatagatgaaatacttttccatattagtgtttgtttttattcatgcatatttggatgtgtctgtgtaagtacatactctgtttgtgtttgtgtgtgtgtgtgtgtgtgtgtgtgtgtgtgtgtgtgtgtgtgtgtgtgtgtgtgtgtgttcatacacattgtggaaactgtgtatagtttttgtgggaaggcacaaatgtatgcagctgttcttgcaattttgtgcacctgtatgaggatccaaatgtcagtgtctggagaatttctgacttagtcttgtcttcttttgagatagcatctctcagcaaactcaggactcaccaattggctagaccactgggcattgggctgaggatctgcctggctcttctgactctgggtttgggcagtagatatacacctggcttttgggctggttaggagttgaactcatgctctaatgcagcagatgctttcccagctgaatcatctcagccccatgcattgttttattgttctagtatgtcgagaatgtcaataacaaacatatattcaatgttgttgatgcgtcatctctttctatggaaattacctcgtgtttattatttcttttcagtcagttaatatggtccattgtgtctacagatttttctgaaagtttagtcccattttcttttcattgacaaaccttacttcttaatgtattattggttttgtatattaacattccttctttcaaaacattaagatgttttggcatttagagctctgcaaattattacttgctgctagctttccttcaaccttcttttataattatagtgcctgggtaaggaaaacctcttgaaatagctggaaacgactctctttgcttcacttctatcaaaggcattgtttaattatagatgctttggtatttgggagatttcagtagtgaaattatctggttatggattttgtttatttgaaagtttaaccaacaaatgctattttactagaccgatctttctaacacttgttttcaaacagtctgtctattgaatctattgaagtgacattattatcatggaattattttctagtgactcaattaagagatgcaggatactgtgaggtgttgtggtgcacactggtaattgcagtaggcagtaacactgaggctgaaggatcactgtgacttccaggccagcctggcatatagtgccaatcctcatctcaacacaaagtgatgcttctttatttgtttcagtctctactgaattatttggccagcctttcagctctgataagcttggctagaggtgtcatttgataatatcctggaggaatcaagcctggttttattgactttatttatttatttatattagatctaattagaaacaagcctgttttacaagtcaatccctgtttcctctacctccccttcttactctcaccctaccaacctcccaccccattcctcctctgctccccaggaagggtaaggccctccatgggggatccccaaagtctgtatcatccttggcagtgtcattaccatatcctcttgatttaaaagaaaagcagttctaacatttcttgtatcattagccattaattatactggtttctttacttgtgaataaccttattttaactaagtacataaaaatacttttgttattgataacattttaaatttagaggcttgagccatggcttagtggttgtgagtacctttctcgaaggctggagttttgctccaagacctgtggcccactgccacctgaaattccatctctgagaacctgactccctcttctgatctctgtgggcaatgtacacaggcacatatttaaatatacaaaaataaaacatactttaaaagaattttaaatataaagctttttaagatttcactgacaatttaaagatgttgctttatcctatttctatttctattttttccagttttaaaaaacaatcagttaccacggtcataagatttcctcagtttaatgttcttttctcctagaccattggattttttctcattcttatttaaatcaatgtatcacatgtctctgtaaagcttgtgtatccttttttaggcttctgttcattaagcttgatgctgatacagcaaaatagatgaattaagtaaaccttgaaagtttatgagttcggggctttgatgggcacccatttggtgtgcactcagtctacccaaagtacatgcatggttttcttatcaccagctgggtatagagtatcttgatatggttttcactgtagcttgttaatgtctcctagaacattattcttcataagagtctctatttttttctaagacattacatagactgttgaaaattttttattaatttctagagacatcagaagtctggatactttaatcagtattctcattgctgtgaccaagagcatgtttttttatttgtttttggttgtccttatgacacaaatctaaaacatgttttcctgataaatttggtaaatttgattctattcaaaaaagcgaagggtatctgttttcaatctgtatgaatattagaaatcagttgctttttgtgctgttttatcaagttcctctattcacagtcattttgggcttctattccttactttccaggtagccattacaattggtttgtgatatcagacttttttaataatttaattttgatagaatctgttgtcatgtactgagcttgtaagtatgtagaggcactaggagctgtgcctgttgacctgagttcaaaccctgagacccacatgatggaaggagacacctgaattatatcctctgaattctacccatgcaccatggcatacaaaactttataaaatattcttaagtgtcatgtactatagatatttcttttcattatctaacttacacaataattactttacatagcatgtcacatatctattttttagacattagtttctttattagtttgatagatttatggcttgcatgaattaaaagacactcctgcagatgtagacttaaattttttcaatacatgaaaagacataattctctctcatttaaaaaatggcagaggtaatctccatcacctcagataattcattatttataaaagtgttctgtggagcagaaaataactatttcagggcataccacttaggaggcagaagatgtcatagtgcacaaaaccatataaatttatcagtatattgatatgttgcattgcatctcaaactccatctgtcattgcttcttactggacaatagtctcaggaccattatttaaatatgtaatttttcagcaagtctttggagaaaaggaaataatgactggaaaagatgacaaccatatcattcagttcatttgccatcggcagacaatcagaactgtttgtaataatctactgacactgctattcggacataatccccaaaatttaaatgaggtatgtgtgatttttgtctttaggtcagtgttttttgatagtgattgctaatgctatcatcttattattaggtagacattaaaaatgcaaagtacttgctcatagaatatagaacaacttaactgacataatatgaatagctcattttataaaatttggcagagtttgcatataatttctaaagttatgaatatggccgtaaaatccatctatagtatttatggataaactaatatttttctcttatttcttttcaataatcacattaagattaagacttctttccagaaaaagtttttctccatcacatactatcatataaaacaaacaaaaacacttaatttccttgctgtggtcaaaatccaatctttctttttaattgattcagtaaagatttgatcataaaagtcacacagttctgcaatactattttaaactctcatactcttagaaagacactatccccttctcattcacccagctctctctccctaccctcaggataccaattagctcaggagatcctgccctttcccttctcccggggtccatgcattcctctcttagagtccttcttgtttcctggttcctttggtgatgaggattgtaggctgctaatcctttgctctatgtctaaaattcatatatgaatgagatggggaggagaggtggggataggatgaaaaggagtatcaggaaggttgagtcaggaaaatagaggggggttaaggggggtaatagtcggggttaggggaaggggaaggagagggagaggggactgagatgagagccaccttgtttctaattttaactaataaaatataatctcttggaaaaaaataaagaaagacactaaccatgttttgctatttcccagagtcatattgatgtgtatgctgggcaaattcgggtaggaacttcagttaggagtatacttcatttttctcaggtaaactttttctgtacttcaattccttttctcttttgtttgaaatcttccctccttggagggttgtgtcaatactctatcttgtgatgatgatgatgatgatgatgatgatgatgatgatgagagtagatagtaacaatgatatttctgatgctgagaggagaatccctgctctgtgcagaaatgttcattgtgaaaaggattttttccattcttatatcttctaagcagtaacttttattttaaaacttgtaaattttgttgatgatctgaggaagctggcctccaggagagctgaggttataaacccagcccagtccagaagcttttgaccatagagggtagagatgattggtgctagagcaggatatcacagataggatgactgaacattgtgttttctaaacaagaaaatatatttaatttaaaaacagagaaaactagtataaaccttgtttacataaaattaatactgttttacaagtatcaggtattagtgaaaggtagaaattttaggtgcctttgaggtctaagcataaattgtgaaacatttccttcataagttttaatatctccatgacaacaaagtggaataaacttgaaaatgaccttaccctaccaagaacattgccaggatgtgagatagtacctatcatcaagatgtatatcctcttatttggaatttcttcttcattcatgggtattcattttttcataattcatgtctgagctgtattcttcattttgcctggactcactggtatgaagtttctggctctattgggcaatacccataagagtgacatgtgtcagattttagcaggtatttcatactcttatcttgactggagaaatctgttaatcacctctctgtcctcccagcattcgaacactgtgaaaaagtcagtgtacacatgtctgaagactagacttctatgaagccctcattcctcattgattttttagagctaaatcatttgggttttcaaaaaacagtgctattatttgaccaaatttccttcatcatgggaatcattggaaatattttaaacaaaataaattctaagtgaatgcaaaaatagttcaattgtaatttatttcttatagaaatgatactttataacaggtgttgaagtcaattaaattttatttttaaaaagtttttccatagccattacctcatttcttaatgtataggtttactgatgtgcatttacctaatttaaaagggtgtgtgtgtgtgtgtgtgtgtgtgtgtgtgtgtgtgtgtgtgtgtgtgtgtacctgtgtgaatgttcttgtatgatggtgtacaagtgtgtgtcagtgtcttggaaaatggatgcacttgcatgtggttaccagagaatatccctgagtgttgttttaagacactatgcaactgctttctgagatactatcacacacttttctgaaacggtctaggtagcttaggctttctgttgaaggccccaggttctgtttctctgccttctgagcattaggatttcaggtaaaaaccaccactatctgctttttcgttcagggttgtggcaactaaatttaggtcctgatgccttccaaacagaaattatactaactaagattattctccagttctaaaatattttccttttaactattatttacagtttgaattctatgtatagtactaaatttaaatattgtgaagtttaatgttataacaagtttacattacaaaataacttgtgcaacactcatcccttatgaaatcataatactaaaattttcacatttcagtgtcttcctacatgtgataatatcatacataagtactactatatatatattgttttgtttgttttttaattttttattagaatcaatcttattttacatattaattccagttcgttctccctctgatcctcccatgcccccccaaccctctccctcctcccctttccactccacatccattccccagggagagtgaggcacagcatttggggcagggcctaggccctccgctgtgaatttaggctgaaagagtgtccctcccttgtgcactaggaataaatactggttccactgcaagaggccaggcctcctaacagtcacctaagttcaggaggcctggttcagtcctatgctggttccccagttgtcaggctggggtccatgagctcccatttgctcaggtcaggtgtttctgtgggtttccccagcatggtcttgacccctttgctcatcactcatccatctctacaactggattccaggagttcagatcggtgcttagctctggatctctgcttgtgcttccatcagttcctagatgaaggctctaggatgtcatttaaggtagtattatcgaggaagggcatttgaggtagcccctccactaatgcttagattcttagttagggtcacttgtggatatctagacatttccctagtgcctgatttctctttaaacctataatggctccctctattaaggtatctcttttcttgctctcctctatccatccctgactcaatcttcctaattcctcatattctcctctccccttccctttttcgctcccctttgtcctccctcccccttcccttgtgcttccaatttgttcaggagctctagtcacttttcccttttctgggtgactatgtctctcttaggggcctcgtgtttcttagcttctctggaggtgtggattgtaggctggtattcctttgctccatgtctaatatccatatatgagtgagtatataccatgttcatctttctgtgactgggttacctcactcagaatggtttcttttagttccatccattgccctgcgcatttcaagattgcattacttttttccactccattgtataaatgtaccacattttctttatccattcttcggttgagggacatctaggttgcttccaggttctggctattttttttaaatagtcatcttcttaatgatatcatatctttgtttgaatgatacataatctttatgcatatgtttcagttgcattcatccaggattacacgatgtgatcatagaattacagtgcacatatatgtggttatattgaatctgatccaatgggtcccatgaaaaaaggttgacacagatccttaattcctagtaatttgctattggaaaatttataagcaacagcatattttacctttaagggaatcagaaccggtttaggccaagcttataactggggcagtgaggctctaaacatgcagcactacaataaggtaagtctccttttactaattttaatgattcctcccttttggaaagtgtatgaaagttctaaagaaatgattattttttaaaatattgctgaacatttttatacttcccaaggtataggtagactgaggccatagagaattttaaaagatggaaattacttcttttcataacaatccacatagaaatatgtatatctacaggtgatccatagtaatagaaatgacttatctattgaaatagaaaattgcttatctatagctataaaaagtatttcaatgcttatcgtttgaacttcacaacaaccttacaacctatcagatacttattgatatcatcatctcaactataaagaatgtaaagttcacaggatttctagttcgataaagttattatgatatttgataatactttaccagtagtccattcctgccttggcaaatgttgagaattcataaatgttgtctatgttctgatgtatataatcactgaattgattcataggttagaatttaaatcttacagttcctactttgatatgttataaataaaaacatgctattcttcattttctcttagtctcctcctccaatatacaacttggagaacaagaaggttcatactgtcatatattgtggtgtaaaagatacattggcaaatcccatggatgttaaaaacttggcagctaaaaccaacaatctagtttatcacgagaagattgatgactataatcatgtggattttataattggtatagatgttactgtaaaagtttacaaaaaattaatttcatttatcaaaaaagatcaatcaaggtgaagtttttgtatgtatttttctgcttattttgaagagtactatgctttttcttaatgaaaatcattttttgatttcctctttctttttcaaaatcattgatgtaaccctagctcttctggaccttgctctgtagaccaggctggcttctaactaagagagtctcctgcctctacttcctgagttctgggattaaaggcatgtgtgaccacacacaggcataatctttgatttttttaatccttttataatttatataaattctttacatatgaaaaagaaagtatgaattctaataaaatgtttaattcatcttgcaaactttctaatttatgcgtattaatttatatatcactgagaggtagactctgagcacagggctaaattttatctgaaataatattccacaatagtgatgcaggaagaggacacatgatgtgtctctggtggattctgactataaactgcctctcatatttatagagatgtcttttactatttattataaaataaaattttggcataaacattaaagataaaacctgagataattacaatcaaccatgacacacaccgtcaaagtccatttccctgctcaaaaaggccctgtaaccactttttaccatatcatcctcttctgaaggtctttccttctcttgtgctgtgtcttcaaggtaactccatgacacattccagatagctgaatgtgaacactgcctctcaaaccaaatgctctatttcattggatatcagaccacaacatagatgaaattcttgtaatatttcccccttttgtctaataaaggaaaagttctaactctaacatagtaaaactatatacaataaaattattatcatgtgttgtccaaatagaaagaaacggtattaacattaacaaaaggacctatatacagcaataacaattatcaagttagaagtaccttcacaatgcccagtcaatttgtttttggcaaatttgaaaagatattccatcatctgtcctcttctgaagagtccaaagtttcatatctaatttattttctaacatgaatatggaaaactgtaacagttaatatgtagtcataaacctcatcagagacttgagaagaaattaatattacctaagcaaacaggaattgcagagcaagcaatttccaaaattataagaaatgaaagaaacagctggctgcttggatagtcaccctaggttcctatgtgatggtggggaatccaacttcagcctataatccaagaatatatgacagacattttggagaggcaggaaaatttgaaggacttaccatgttttggaaaagtttggtaatcccttttctttgtatcctgtttgtccagtttggacagcatactgtcaacagttgtggcaaggaagtttctttcccaaatggccagcatttgctacaaaaagtaaactccaattttgaaagttctttgatggccttcagccttttttcaggtagattggtactaccaggaacaagcatgactcattgtcaagaaaagcctaatgttattaagtcatattatatgccatattctgtaggtctttgaagtgtttgaagattacctatctatctaaaatatatcactgtgtgaccttgaaaacacacctaatgtgactataagtttgatgtttaaggatgactattaacctgtatttctttattatcctacatagcttttaaggactaaaactttatgttacataactaaatgtgctgcataggtacaatatcttaaacaaaaatagaaacatatgttcagtataataaaataaccttgaatggttatcaacatacaaaatatattaaataagactagaaacataaactttaaattgtatacatataccaaaatccatattaatgtaaaattgtttaagattaatagttgctctgagattaaagtagactccgtagtctacccttttccttaacattcctatattccatctttttttcttttcagaaaatggatcactgaatctaactttgaataggattttcttgaacacatccagtaactatttgtaaccaatacacctaaacaatgaaaatatctacaaatccactgaatgagcaaaaaacatctgccccacctcttgggaatgtgggcatcatgtgttttagactttttcctcccaatatggggtgctggcatgtttacaggaccctgagaaaatagagattatgatcaaggcctgtggaatccacctgttatccagtcttggtatgatgagaaaatgcaagtctatctgaagtcttggctggagtagtctaagaggctggaccatattaaataactgtcttgaaattgtttggagcagtttgtagtccaaagctgatctttggatggcagtttacagattagtggtgttaccacaatcccaatgtattcatcattgtgagacaccatcatcttttggagacttcaaaggtcactggtaggattgttcatcattcactgtagaaaatgtaaatattttaactgtcatatgcagcagatctaggaaaggttaaatgaccataacttatataccaggatacatagtcttaattcctaaatacttactttagaccaagcctaaaatcacacaccaatagttacatgaagcctaaagttagagttacttaatactctatatgaccattaatatcaagacagaaaatttaaaatttgagataatagttatactttaataaaagctttaaagacaaaataaatcctagggatataacattaatgacaatataatagtccatagattttgcttttcttctgtctcataccaggtggcttttctgacataagacagagattttggattttattttaacaaacatggttggctttagagaaggagacagccatgctccaactccaaaaccagctttagtttttaattaagttgggactatatgaagtccaactgcctaatatgtctgtagagaacaggaaaacattttgaaagattcattaaattttattgtgttggaagtgtgctatgccattaggtcaacttccttctttcctggggactttttttcacccttctttttcagatgcttcatatgtccaaaagtcttcagattccttcattgtatgcttttcttctcttagaaagaacaaaagaaaaccaggcccagccttaatttgggggagttttcctttttgcctgtttgaattgccatgctgctttatgaactattgcctctcctaatcaagaggtctctcatgtttgaattgaatatttataatttgatagtatccaaagctttttctcccatagaagcagaagcaaaacctctttcccaatgtaacacatacctggtttccttctggggtcaacacatctgtaaagtatacagggagatttagtttaacagttttgttttttctattatccagtgtctctccaaagttggtgtacttttttcattagcatttagaaattttaaggttaataaagcacgatgaatttgatctctagtggtcactagtaccctttcagttgattaatcatttcttttaaagtgatattagatatttctataacttcttgttctttaagtttgtgtggtgtacctgtaatatgatttatcctataatatgtttaaaaaactgttgtattttactaaagattttaatttatacaggtattcccataatgtccaaaatccctaataagaatattacaggtataccacatcattctatagggcaagcagttatagaaagatctaaatgaactctaaaaatatgcttaataaacagaaaggggtaataaagaccgctagaaataaattttttaacctaatgttagacccaatctttctatcaaacatgggtagcttttactcattgtgataacttgactatatctgcaatgactataatacagaaatggagggcacacttgtaatctgggtcttgaggcaagatgacaacatgccttgaatccagacctccagaggggaagacaaaagttttttaatcagatatggagactggaaggcacaaccctaatctgggccacaccttctgctggaagcccatataaggacaatgaaagaagaaagagttagttctttgcctgcttgccctcacattgtcaatacattaattccttcactggagtagagcccagaagaccagctgcgatacccagcctcctgagattgaacagctactagattctttgactttccattcagagaaagatagatagatagatagatagatagatagatagatagatagatagataaaaaagatagaaaagatagatagatattgattcatattccctccataagttctgtgactctagaaaaccctgactaatacattcatctttgttttagaaatagatcacaaaatatatgtatatgtatacatatatatgattctaaattgcaagttacatctttgtcaagtgagccattctatatgaagtttaatataaaataattgctttttattttattttttattgattctttggtaatttcacatcatgtaccctaatctcacctatcatccagtcctccacctccacccccaacccttgtaatgtcccccaaaggaaaactataaaagaaattttgaaaataagttaaatataaaaagaagaaaaatattaacacaaacaatacagtaaaaacaaaaaacacaaaaacaaataaaaatatcaacttcaattaaaaaaaaaacaaaaaagcacacacaaaaagcaacaacaaaaaagacccctttgctcctccttctttgtctttccattgtcttttcattaatcttagcagaattaggagctgctgtgtattgtgcattacagtgttctgtgcaagctgctactcttgcaaatgttccttgtgtaatgtgttgttagtcaggttcaaggactctggctctctgcacaccatcaaccctggactccaatggaaactccacatatatcccactcttgcccagactcatgcagatcatgtagccatagctctgcagcgatgggggaagtacttctatgtatgtttatcttattgattgtttaataaagttctgtttggccaatgaaacagcaagttagacaggactaggagtcaaagaggattctgggaaatgtagtagagtagtggtgatccaggctggaagtgacatagcaaggagactcatttttagcaaagagaaagaggaaagcccttgtcccctggctgctccataggcgccatgtgagccaccagaaagagagggtgccaacaaaaggcatcttctataagataaatcttataaaatatatagatttatgataattaagactgagataacagatgagaatcctagtcattggccaagcagatttgaacctaatacaagtctctctgtgcattaatttaggccctaactctggcgggcagctggcataaagcacacatgtggttattgggctcaggcagctttatcggaaagatttatcgtaacattgcaggacctttcattcactccagcaggtaatagatggggtattataggagaaactatggccagcctgccaaagcctgccgaagcaccttccctcggtgcccaggccagcatgcatgaacatgtgcattctaggcaggcatttcctccctgagacaagccatcaagcctgactcaatacccagtgagacacctgacccagagacaccaatgaggaaaagacaatgcagcagagtcagtcacctgagtcaatagaactttgggagggggtataaaggcaggactaactttcttaataaaggagtctgcagcacgctctgctactcactgactcccagtgcctgacttgttggtgttgtgtcctttcaccccttcccccaaggggtgtctgagcaaggtaacctgcaaaagggtgtatgtttgggtgttccaaatcagagctatggatatgtacctgggtgtctgctgagttgctcagccctggcctctgggatcacttccttcaggtgattggcagaaacagctttcctaggatcatgataacaggtaaggccatctttctcaagtgtgagaggctaaaacagttccaaacaaaaataacatgccaggaagtattatcatacttaatttcaaactatagcacataaatatagtagtaaaacagcaaagtactgacacaaaaccagatacattaatcaatggaataggattggaaactcagctaaaagtccacacaacttcagttgtcttgatttctgacaaaggtaccaaaaaaatacacacagaataaacaaagctttcagcaaatggtgcttagaaaactggattttgtcaggtaaaaagataaaattagattcttatctctaactgtatagagagtcaactctaactggatcaaagaccccaacatgagaccttatatcttgaaaccagtagaaggggagaaaaaggcttcaacttgtatacacaggtaaggatgttctgaagaagattctggcatcacaggaaacaagacaagcatgggaaatgacattcaagtggaggcgagtgttagtacaaagtttgtggagatattatacacttagagcatttgtgttacacattaaaggctattgattccagaaagtgaaggaactgagattataaaggaagaaatgaactgtgagatacaattaggcacaatatcgtataatatagttttagtttttatatttaatattaaagtaagtgtacataataatcactatataatattaaagtctgaatatactatctattatttaaaataaaatattttatgagttacataaaacacacttctattttgtatgtagccatatgtttttttgactacattattctttattttaactgtgagaaattgctttactttacacagtttggtaaaatctcatcatcctcctttttattttctagtatccaaatattgaatttctatgtgttataagaaaagcagaattatctaatttataattttggatatttaagaatatggcaaagatgttgcctcagcactggtgagggcatcattacaatggtgggatagaaactcaagacatcatttggtgaaacgggaagcaagagcatgcaggtacaattacctgaaacatctggaactccagttttaacaccatctaacaacctcttttggaatcagacacacaagtagtgccctgacataacatacacctaaaaaaaaaaatgccaattgtctctggtgaacactctttggttgactttcccattgctagagcaccatgtcaataaatagaagcatagaactcctaataaataagaaatttatgtaagagaatatgattgggaattatgtaataaattgtgttattctgaagctatctcttacttaacattttcaaaatatttaacaatgacttcaaatagatatttaaaaaaaaaaaacttgtaagcttgcaaatgataccttctgtggggaagaaaagatgtttacgttatttgtctaaaacactcacatcctagccaggtggtggtagcacatacctttaatcccagaaacttggaggcagaggcaggaggatctctgggagttccagggcaggctccaaagctacacagagaaatcctgtcttgggaataaataaacaaacaaacaaataaataaataaataaaacacatcctttgctaacctcactacacaaagttaatgatggtgtcttaatgcagatagacatcaataccttttatgtactaagatactgtttcctgagttgagggtataaagaaaataagcagaataagattactggatagtttcagagcaatagtaagaagttacaagtaaggaaagcaagcagaagagttgatcaataataacaaggagaggatgtgaagtggctctggttacagataaaatgaaaagtggtaaaggaacttcatcagatacaaaacaaacctggcactcacaggatgaatatgtgtgacttcactacacgccagcctgtgtcccttgggaacacctatgaaagatgggggccgggggtgggtgggtggtcacaggcagccaactctcaatggcttagcttggaactttccctcgtaggctagactagctggctaggaagacagatacagctttctctttttccattttaccactactgagaatctgcaggttccatgaatggaacccaggttgttagtctttcactgtaatccctttgaccccttgagccatcttgccaggacctttttaataaattaatttaaaaaatcagacatatatttctgtgagaagaatctctcccaaccagacttgatctactgctgctatacaatattaacctacaaaacagcaaatcaccttgacctaatgaccctcgctagggtcctcctctcatgccttacacattcaagatagcaactcaactctgggcaagtttccagtccacagtcctcttggattatgaataaaatccaggcttcactcttacagctgcatataatgtcccctcagggactgtttccctctgaggaccttcatgcaggcccaaccttctacacaatcaatggctgccctgtgattctccttaactgtggaggaagattccacaatccctttactcacacccttcatgactctgaagccaggcacagcaaggctgggccattgcatcacatttgtagcagcttttgtttgttgtttttgtttttcaggaatggaaattcatcattcttttcctttctacaagttgtaagcttagctgggtgggtactttcttggagaagacctctccctgtattccactttggatcaagcctcaccttcatctcacctctttttaatacaagtcttggctccaacttttaaatttcctggtgtttgttttctcttcacactataattttttttaatttgttttgttctacttgctccttttctttgtagatcctcataagagtgattgctagtaaccacatgacagagttgatagtaagctgtcattatattttagcctcagtacagaaattgccacattcttttccaaactaccatgagtgtgatctctagaacagttgcttctgttgttctttctgaggcttcttgagctgggctgccatagcccttatatgttggtccatatgatgagaaacatgagcactaagtggctcttgagtttagctttctgtagtactggacaggaagacagagtccctgctgcatcaaagtcccaggttttccggctcactggccctgtgtggacctttagttactatagtaagagttcaccatcatcatcttggtgacagtatctgatcctgggtccataggtcccagtctctttgcctctacaagtaatattcatatctcaggttttgttgttttgtaataggtatgaaaataatctgggtatgaaattttgtacattgtattttcttttaataactttgaaatctttactttaaaattttttagcctgtaaatttcagtaattaataacacttagtatgagaattcatgtttattcagttaacacaaggaagagtagaatcaaatagatatgattattatattactttaaatatggagtggaatatacagacacaatactaagattgttaacactgcttttagggttatagcttagcttcagctataaaataccataaatcatattgaacacttttaggagggaagtatgggtaaaatagaaagtaatagatatgaataagagaagatttcaaatatccatatgtataaaacacaatgagttctattatagttgtatgcttgggaacaaatattaaatgacaaaacttttcttgttttctttcagccgcacagcctcttatgtatttgtaagatggatggactctgctcctgtttggactctctactctgccagcagcagctagggcttcatggttttgatgtgtggctggggaatagcagtgacagtaagtatgccaggaaactcatgttcatagacagagattctaaagaattctgggattctcagaatatgtggtgcgaatcacttttgctgtagttttatttttttttactgcttaaaatgttctgtttcatcctatgtatatttaactcagtagagggaatttcactaatatatcaaagtattgattttttttaaatattgatagacaaaatttgcttaggattttatatttttaattttgattaggattaagaaatgaaaataaatgtaaaatattaattcctatataaccttctgcatccaaactatcaattgttttgtcaattcatctacttgtttcacaaagtaactctacttaagtatgttcctttataaagtccatatttcacaaacgtaatttcattagtatagacatttgtaaattctcacaaaattttcatttatcatgggtattctatttttctaatcaaaaagggaaggaaaattatgtataattttgttctgacagaaagttccagaaaaatatattgttactttcaatttttaaaatgtcttcccattttcatctttgcacacctaccagatatactgacaacttaaaaatgcctttctcaaacacaaatataaaacttgttagccaggtggtggtggtgtacactttcagtcccagcacttgggatgcagaggcaggaggatctctgtgattttgagaccagactggtatacagagcgagttctaagaaggctctaagctacaatgagaaactccgtctcaaaaaacaaagacaaacaaaaggccatctcatcgtttttattatgtaaatatgatgtatatgatgtagtatattgccttacatttctaaggacagaactttgaagtgttgtcaatcactaattgcctaggactctaaataattcttcctcaactctgacaaaaaaattgtcctgcataaaattgcatcaagttattctgtatacactgaatgaaatggggcttaaaagaaggaaacatggtggagtgtatgcaaaagataattgattaatgctttctcattaccgatgtatcacttcagagacttttaaaggtctttcagttttattactatctcatagataagacttgttagtcacagtataagcatacactaaattatttgatttttctgaaactcacaatccaataaggcaggtatatcattaacagtacagaccaccagatgcactacactaagtacattgagggggtagcagggtcttctttatccagcatcaagatgaagggaagaggtgctgaggctgcaggtttcattttatagttgacttgtgattttccttttgcagtgtgcagtacctactctattgtctttgtttagagttttaactctagtgtgccacaaggacctttttcttgccttgtggatttgatgttccatgtacttcttttactctgtacatgtgtgtagtagtttggaataaaatgactcccaaatggagtggcactgctaggaggtgtgtccttgttggagtaggtgtagtcttgttagagaaagtgtgtcactgtgaagatgggatttgaggttcatattcgcccaagccaaccacagtgagataattcacttcctgttgcctttggatcaagaggtagaattctcaagttccatgtctgactgtacaacctgccgtgctccttgccatgataataatgaaaacaaggaaaaatataactataactatccagccttcaactccctaggagacttgtggggagcagaatattgtgctattagaggagttctcagggtggaaagctctgaacctctagtcttcattgaattgcagatgctagttgatttgctattgaatagcatagcctcagtggagaatgcctcctagtttgcatctctacagaactaagcatttgaataggcctggatcagggctgagggctaggtgcacctgagaataaggatacatagtcaggaggtattggtctactggagcagaggcagtggagagagatctgctaatagggtctaggaagatggaagaaaaaaagtctcagggtcagggaagaatggttagaaagcagccaggaagatgctgaatatagaagagactccagtttttcagcatagaactgagagctctctaaagatgataagatgcctgtgtctggtttttatcaccattggggtgctaggagtttccaattccatgctctcccactcatgctgaccctcgaggcttccatggtttggggctaagacatgccaggccacgatagagactgaagaaggaaatactattaactgagtaagcaggaagtacaagcaaatgatttgcaaaatatgtgagaaatgacagaaacagctggctgcctagagagtcacctaaagttcctctgcaacattagggcatccatattcagcctataggcctaacatatctgacacacttttctgtaaaacatgatatttaaagtctgtcaaggtttgccttgacaaggtttggcagtcactttcttttgtgtcagcttgttcagtttgaacagcacaccctcatcagtaaacgcaagggcacattcttgcccagtgactttatttgccacaatgaaagtagtcttcatgtggagtttctttgattcccaacatcttctctgaagtagattggtgcttccaggagcagacaagtgtcgttgttaaaaaaaaaaaaaaaaaaaaaaaaaaaagaacctatattattagaacaccttaaaagctatattatgtagatctcagaagtgtttaaagagcacctgtctttctaaaatatatctctgtttatcttcgataacatagctaaaatgacaagtttgattgtaataggtaactaattactaacctacatttccttattatcctgtatagttgataataataactttcaagaactataaatttgcattgcattgttaaatgagctgtgtaggtatgatacctttgaagggaccagccccccatttcggcagccatgacagtaacacgtgctcgctataaccttgccttagtcactagaggttaagtgcatgcctggtgaaaaggaaccaatcaggagttagctggtggtgctatgctttacgactctggatttactttacagacaagcacacagcagtgacgtgcagagcatagcaaccaccctgggagggcctatgggccataacaaccaattggccaatcaatacagggcaagccctccaagcctagaggcacaggaatcctgagcctgcgggtacccctagacaccccctttatgctgccctacaagatctctcagcagccagtcaaggggtcttttgtagccatccgccatggtggatggatgaaagacccaagctaacatgggattagctccttaaacaacaataaagcctcatgcagtttgcattaagctctcaaatctgcctggcgattggggtgaccgaagtcatgggctgagaccctggaggcctgagtttttctgggggtctaacaccttgaacaatattagaaatttatatacagtatgttttaaaaaaattaatctcaatatacaaaatttgcatacaatatacaaagtccaatctaattttaaaatatttaaaactagtagttgatttgtaaaaatagattcaataacttatcatatctatatcctcccttttttcttttcagaataaatgcaataatctacccttttatcctatcatgtctatgtacccctttttttcttttcaaaacaaaaactcttaatttaatctcctttgtgtacctttttcctaatcatgaccaataacaacttgtaaacaattgcactaaacaatgacaaatattcataacttagtgagtgaccaaaatccacccaacctacctttgggaatgtggacatcatattcttaaatttacttcatattgttttggtatgagggcatctttagggaatcatgaaaagaaaaagttgtactaattatcaagtctgggatggagagtaactgtgccatttttgttcagtctcaataatgagaaaggtcagggcttgtcttaagtcctagctagagttgtctgtgtgactggatcatctcagcaagctacctctcaaatattctgagcagcttttagttcaaatcttttgttggagtttttcagctgagttgtattaacatagtttagtggaattatcatctgtgtggccccaacctgcttttggaaacttcaaaggttgctggtaaacatggtcatggttcgttgtagaaaaatgatagaaactcaaacccaaaatcatgtacacaaaggttgaaaactttaaaaagaaaagaagagccttcattgtgtcccataaagttggttgtactgtgttttcacttttattcaattctaaaatggtttttttatttctgtcttgactaatttttcactcagtactgaattgttcaatttctatgagttcatatgctttctgctatttcaatagttattggtattaagattaaatccataatgatcagattggataaagggtgtttctgcaattttcttgtataaagacttgccttgtgcccaggtatctcactttggggatcagtttctgtgactaaacaccatgaccaacttaaggagggaagggtttatttgacttatttacacttccacatcacaaaagtaagtcaggagaagaactcaaacggagcaggatccagaaggcaggagatgatacagaagccatggagagtgttgcttactgacttgttctcttcatgcctttcttagcctgctttcttatggaacctaggactattagcccatgaatggcaccacatatcatgggttgggctctctcccattgatcactaattgagaaaaatatcttccagttggctctcatggaggcatttcctcaactgagtctccttcctctctgatgccactaacattcgtcaaattgacacacaaaaccagccaatacaccaagtatgacataagttttggagacagttccaggagatgctgagaaggtatattcttttttgtttgcgtgatgttctataaatagctgatagattcattttgtttataatgtctgttagatttctctgcttccttttgttctgggtagcttatctatttgcaagagtggatattcaagtcttccactaactgtgtgagggctaatacgtgatttaagctgtactagaagtgtttcttttatgaaactcaagtgccctagtgtttgatgaatagataagaattattaagtcgtcttgatgggttttccttagattaatattttgtatcctttcctatctgttctgcttggtttggcttttaagtcttttgggggtcagatattaaaatggatacactgttttcttcttatgtccgtctgcttgcaatatcttctttctatccttctatccttaagtgaggtctatccttgacattcaagtgtgtttcttttttattttttttaaattaattcaaattaaggaacaaacttgtttcacatgtaagtcccttctccctctccctcccttcaccccatccctcctcccccaccagtaacctacccccaccccaaccacccaccactccccaggcagggtagggcccttaactggggctctgcaaagtccaccaaatcatcctgtgatggacctgggcccgtccccttgtgttccagggacagagtgcatcccttcatgtgggatgggaccttcttacaccagggaaaaatactaatccactaccagaggctccctggagtgcagaggcctccttattaacatccatgttcaggggtctggatcaatcttgtacaggcctcccagacagcgtctggggtcgatgtgctctcccttgttcaggctaactgtatctgtgtgtttctccaacctggtacagaccccttccatgttcattcctccctctctcaaactaaattccagatttcagctcagtgtatatctgtggatgtctgtctgtgcttccatcagccactgcatgagggctgtaggatggcataaagactagtcatcaatctcattttggggaagggcttttaggttatcctctccaccattgcctggattgtcagattgtgtcatccttgtaggtctctggagatctccctagttccagatctcttctcagacctatagtggctccctctgacatgatatctctcatcctgctctctttcctctattcttcccccaactcaatatttctgctcctccatttcctctcctctactcctcttctcttgctcttattgtggcagctccctctcccctaccctcatgtccccatagctcaggagttcatgccacttcccattcctggggtccatttatcccttagagtccttcatgtttcctagtttctttggtgaagaggattataggctggtaatcctttgctctatgtctaaaattcatatatgagtgagcacataccatatttgtccttttgtgactgggttacctgactcaggatggtttcttctagttctatccatttgtctgcgaatttcaagattccattgcttttttctgctgagtagtactccattgtataaatgtaccacattttctctatcctatctctgtctctatctatagttgaggggcatctaggttgcttccaggttctggctattacaaacaatgctgctatgaacatggttgaacataagttcttgttgtatgaacatgcactatctggatatatacccaagagaggaatggctggatcttgaggtagactgatacccatttttctgagcaactgccatagatttccagagtggtcttagaagttcacactcccaccagcaatgtaggagtgttcctttttctccacatcctctccagcatagattgtcattggtatttttgattttagtcattctgataggtgtgaggtggtagctcagagttgttttgagttgcatttttctgatggccaaggattttgagcactttcttaagtgtctttcagctatttcagattcctctgttgagaattctctatttagttctgcaccccactttttaatttcattgtttggtgttttggtggctagcttcttgagctccttatatattttgaaaatcaggcctctgtcatatgtggggtcagtgaagatctttttccattctgtgagtggtcgttttgtcttactgactgtgtccttgccttgcagaagcttctcagtttcaggaggtcccatttattaattgcagacctcaatgtgctactggtgtaatgttcaggaatcggtctcctgttccattttgttcaagggtaattcccactttctcttctagaagattcagtatggctggatttatggtgagatctttgatccatttgcacttaagttttgtgcatggtgataggtatggatctatctgcaatcttctgcatgtctgaatccaattgtgccagcaccatttgttgaagatgctatcttttttccgttgtatacatttcacacctttgtcaaaaataaggtgttcgtaggtgtgtgggttaatatcagggttttcatttcgattccattggtctatctgtctgtttttgtgccaataccaagctgttttcagaactatggctctatagtagagcttgaagtcgggaatggtaatgcctccagaagttacttttttgtaaagtattgttttgaatatcctgggtttttaatttttccatataaagttgaggttgttctttcaatgtctgtgaaaaactgtaatgggattttgatgtttattgcattgaatctgtagattgcttttggcagaattgccatttttactatgttagttctacctatccaagatcgtgggagatctttccattttctgttatcttctttaatttctttctttaaagtctcaatgttcttattgtacaggtctttcacttctttggttagtgttatcccaaggtattttatgttgcttgtggatattgtgaaaggtgatgttttcctgatttctttctcattggatttatcatctgtatatagtagggctactgatttttttgagttaattttgtatcctgctactttgctgaaggtgtatatcagctgtcggggttccctggtagagtttttcgggtcactaatatagactattatgtcatctgcaaatagtgaaagtttgacttcttcctttccaatttgtatctctttgatccccttttcttgtcttattgctctagctagaacttcaagcacaatattgaagagatatggagagagtggacagccttgtcttgttcctgattttagaggaaacgctttgagtttctctccatttagtttgatattggctattggtttggtgtgtattacctttatcatgtttagatatgttcttgttattcctgttctctccaagatctttatcatgaagggatgttggattttgtcaaaggcttttagagagtctagtgagatgatcatgtggtttttctttttcagtttgtttatatggtggattacattgatggattttcatatgttgaaccatccttgcatccctgggatgaagcctacttgatcatattggatgaattttctgatatattcttggattcggttcgccaatattttattgagtattttagcatcaatgttcatgagggatatcggtctgtagttctctttcttagtcatatctttgtgtggcttggatatcaaagtgattgtagcctcatagaaagagtttggcaatatccaatcttcatctattgtgtggaacagtttgaagagtactggaattagctcttgtttgaatttcttgtagaattctgcagtgaagccatctggccctgggctttttttggttgggaggcttttgatgactgcttctatttcattaggggttataggtcgatttaaactgcttatcttttcttggtttaattttgttaagtgatatttttctagaaaactgtccatttcctttagatttttgaactttgcggagtacaggttttcaatgtatgacctgaatattctctggatttcctcagtgtctgttgttatatcccccttttcgtttcagattttgttaattaggctgctctctctctgcgttttggttagtttggctagaggtttggctatcttattgatgttctcaaagaaccaactctttgtttcattgattctttgtattgttttcctagtttctactttgttgatttcggctctcaggttgattatttcctggcgtctactcctccttggtgagtttgcttctttttgctctaaagctttcagttgttctgtcgattctctaatgtgacttttctccagtttcttcatgtgggcacttaatgttatgaacttccctcttagtactgctttcagagtgtcccataattttgggtatgttgtgtctacattctcattaaattctaggaagtctttaatttctttttttatttcttcctcaacccaggaatggtgcaattgggtgttattcattttccaagagtatgtaggttttctgcaattcatattgctgttgaattttagctgtaatgcatggtgatctgataagatacagggggcttatttcagttcttttgtaactgtggaggtttgctttgctgccaactatgtggtcaattttagagaaggttccatgtggccctgagaagaaggtatattcttttgtgtttggatggaacgttctatagatatctgttaaacccagttgggtcataacttctgttagatcctttgtttctttgttaagtttctgcctggtggtcctgtctagtggtgagagcagggtgttgaagtatcctactataagtgtgtatggttttatgtgtggtttgtgctttagtaatgtttcttttacaaatgtggtgccttcatatttgaggcatagatgttcaggattgagacttcatcttgatggacttttcctgtgatgagtatgaaatgcccttcttcattctttggattgttcttagtttgaagtctaatttgttagatattaggattgcttaccagcttgtgtcttgggcccatttgattggaaagttttttcccatccttttacactgaggtaacacctgtctttgaagttgaggtgtgttccttgtaaacagccgaaggatggattctgtcttcgtatccattctgttagcctatatcttttttatgggtaagttaagaccattgacatttagggataataatgtccattgtttgttagttcttgtttgttttggatttattgttggcggtgtcattgtgtgtggattttgccctcctgtttctttttgtgtttgttaaaattagattatctattgcctgtgtttttttgagtgtagttatgttccttggattggagtttttctttcagatcctctgtagtgctggatttgtggatatgtattgtttaaatctgtttttgtcatggaatattttgttttctccatctatagtgattgaaagttttgctgggtacagtagtctaggttgacatccatgttccctttgtgcttgtagggtatctatccaagaccttctgcctttcagagtttccattgagaagttgtgtgtgattctgactggtttgcctatatatgttacttggcctttttcctttgctgctcttaatattttctctttattctacagatttgctgttttgattattatgtgttggggggacttctttttgtggtccagtctctttggtgtcctgtaagctttgtattttctgtagtttggggaagttttcttctatgattttgctgaatatgttttctgtacctttgagcagtgtttcttcaccttcttctatacctataattcttagatttggccttttcactgtgtgccatatttcctggatattttgtgttagggattttttggacttgaggttttctttggttgatgaatgtatatcctctagtgagtcttcaagggctgagattctctcatctcttgaattttattacttatattcgcatctttagttcatgatcatttatccagcctttccatttccagcatcgcctgattctgtgttttctttattgtgtctatttcagatttcatggtttgaactgtttcaagggcttccttcacttgtttggctgttttttcttgggtttcttttgattctttaagagatttgtttatttcttgaattttttggtttgccttttcctccatttcgtgtaattttttgcttgctttttcttctatttctttaagggattttctttaaaggtctctttaaaggtttcctctttaaaggtctctatcatcttccttagataatttttgaggtccatctcttcttcatgctctgtgttgggctgttcagatcttgctggagtggagtcccgggattctggtggtgtcatatgggtctttctgttgttgagtgagttcttattctgtcttcttcccatatcttcttccagtggatacaggtggcgtttctctatctcctcttgtgacccagtggtgtgtgtgggccaggaattcaatgtccacagctctggatgatctcgcctcttctggtagtctcctcactctgaaggagctaggcctctgtaggggtcaggttggcgggaagggaaggaatagtggggtgtttccagactcagggagctcctctctacctgggcatgtctaccctaagcaggtgcagaccccaggagattggggtgaatggggctttggtcaggaattgggtaagagcagaggatcactcacctcattatggatcaggtcggtggaaagggaaggctcaagtgtgttccttaatggaaggatggatcctgtttttttatatccattctgttagtcagggtctttttatcaggatattgaaattactgatattgagagttatcaataaatagtgttagttctcattattttgttgtgtgagatccttcttctttggaattgcttgtctgatattatttattccttgaactttcttatgtttgattaacctctaaggttgtactattcattttagccagttcaatagtcttggatttatagatagattgcttaaattaacttttatcattgaatgtctttccttctacatctatcgtgattgaaaatttctcttggtattgtagtctgactgtggtctttttcccttatactatgcaggacttccagattttagagtctccattcaatagttacatgttattctaatagatttacctcatatattgctttcccttgaagcttttaatattttttgttctgtacattttatgttttgattcttatgtaccatggggaatttcttgtcatgtcatcttttaaatattattttacataccaaccacagtttgctcttccttctttcatcccaatccctccactcacctaccccatcctttccttctccatctccacttagaagtgtaagaactcccataggaatcaacaaagcatggaacatcaggctgtggcagtaccaatatcctcaccagtaaatcaaatctgaacacagcatctgaccatagagaatgggtttcaatgagccagctcatgctcaaggaacacattctggtcccactgctggggaaccaataaaagaccaagctacacaattgttcactaagatgcagagggccgagtcaatcccaggccagctccctagatgttcatatagagtctgtgagttcccacaagctcaatcaactgtctctgcaggtttccccatcacaatcttgactacacacacttgttcatatgctccatccaccctctattcagctggaatcctagagccgagcctagtgcttggatctctgcatctgcttccatcaggtactggatgaagactctatgatagcaagggaagtcactaatctgattacaggggaaagtcagttcagggaccatctccactatttctaggagtcttgtatagactcgtgattataggtttgcaggagtcttcctggcattaggtttctctgtaaacacacaatggcccacccatcaagatacctcccccagcactgtcccacactatcccacccaaaactcaaccatcccgatcccttatatttcctcccaatattccctccatctattgtaggggaagctgtagcaatgcctgcttaggggctggctaaaggtgtatcagaccaggccttcaagggcatggtcagggtgacgtagagtgagagttggtcaggtgtctggtttctggtttcattttcacttttgactttcttagagactgctgcccgccagccagctaggtggcactataagtaaggctttttccctattaaaatcccttgtaatttcccgctttattctacttctcctgcatactgtttacgcagaacatccaatctacttctacttccaagggcaatcaatgtgtcccacttagggtcctccttgttatatagcttctctggggctgaagattgtagcttgtttatctttgcttaacatctaatatccacttttgagtaattacacactgtttttgtcattctggctctgggttacctcagtcaggatgacatttttgtcaacttgcctgtgaattttatgatgttgttgtttcttcctactgagtagtagtacattgtaaagatacaccacatattctttatcagttatttggtagagaggcatctatgttattcctagatcctacatattatgaatactgcttctatgcacatagttgagaaattttccttgatgtatgactgagcatccattgggtatatgcccaaagtggtgtcacttcatcttgaggtagattaattctcaattttctgaaaaaatgccattctgatttccaatgtgactgtacacatttgcacacccaccagcattggaggagtgttcctttgacttcacatctcctccagcataggctgtcattagcatttttggtcttggcgattctgacaggtgtaagatggtatctcagagtcattttgatttatattttcctgatgactacggaggttgagcatttctttaaatgtatcccagtcatcaaaattcttctgttgaaaattctttgttgaaatctgtatgtcatttttaaaaggattatttgcaattttcatgtctagtttcttgagttcttaatatattttggatatcagcccttgtcagacatggggttggtgaagatcttttcccatctgtaggctgccattttttctaattagaaagggtcctttgcctcacagaagcttttcagattcaggaggtttgacttattaattatggctcagtgcctgtgctactggttttattcaagatgtggtctcctgtgacaatgtgttcaaggctggcccagtttctttggtgttctataagctttttgtaccctgatagccaccacattctttagattggggaatttttcatctgattttcttgaaaatattttctctgcctttgacctgggtttcttctccttcctttattactattattcttagactttgtcctttcacagtatctttaattttctggatgttttgtgctagaatacttttagatttaatattttctttgtctgatgaatccctttctcctattgtgttttcaatgtctgggtttttttcttccatctctgtcttttcttgatgaggcatgcctctgaggttcctcttaaatattccatttccaaatttccttcagtatgcattttctttattcattcatttgttaatcatttattgattctaatttaaggtgctgatatatgatattaagtttgttgggttgacatttttcaccttgctttctgctgccctcttttgttcttaaaagtgtgtggccatgtatggccgggtaggcatattttctggtattctgctagggttgtctactgggtgtcccaggtagaatgtgtttctaagtgatggaagctgacacttaggaatggggattgacatggagtagggatgaaccagtcaaggaaacaattgtttcaccagaatctgctttgtgcccctgggaatgggggcagagaatgaggaaaggccaaggcaggtggtctacagaactgggaatgagactgacagggttggatttggaggagaggaggtgaatgaacatcagaagagcacctacctgttccttaccctatcttcttccctggtcaatatagccaggaattcccagtgaattacttcaggtataggatgagacaaagaaatggacttgagaaggatgtaggaaaagattgtgtgattctctggagatgggaaagagacttgccaactaagtttggagaaaaggtatagacagtatctttaccaactggtcccacaccccttcatcctcaaataaatacacgatgcttctataatttataaactatttggccaatggcttaggcttcttattggctatctctctttaaaaattaacccattttattaaactacatatctccatttagtcttgacctactggagaatgcccagaacttttactcctctagcagttacatggtatctctctggaggctcctctctgtgtcccctcccaagaattctcatctggaagcccttcctataaatcctgcctggctactgaccaatcagtatattattcttcaaccaataagagaaacatatatacagaaggacatcccccattggaaaggggaagggggaagatctggagactgcttctaagtacttaatctttgtatgtacctaatgggaagcatgcttaaaagcctatatatacaacatttgcatgctgaaaattttttgaatagaaagaaaggaaactttgaatcttcaaacattaaagatttacagtagtagaactttgcatgaccatacacacacatgagaggcaagggtagagacagacagtcagactcacacacacacacacacacacacacacacacacagagagagagagagagagagagagagagagagagagagagagacaaggaaaagcaaacaggtggtttataataccagctatgaaggactagaactgcttacaacttcaagtgctgatggtcactcagaagttgaaaaccttcccaaaatactgtatacagctttaattttaatagagtttcattgggtatatgtaaatatgtacaaatgaaacacattgtttgattaaatttaatactgattgtaaaagtcagtacccaagatttgtatctatggcttatagaaatttggagaaaaaattgacaccatgcccaggaggacctagtaatgttataaactttctgatattcagtaagacataataaaatcagtgagctcctgatttttctggattcacacttttcttccaaatacattaaatattagcaacaaatgaatggaatatttcacagtagtaaatggtttaagctttttttacattgtagaatactagacagaaatatagcagtagatggaaattataagaatggaagagttccagtgcccgggttggagcctcctgaggcctggggactgcacacagggtcccctaatgtggggaaatcagctcatccagagtctgccagtatcatggtgctagtcctgcttccacccacaggagaacataagcatgggcctgtttctggcccagcttctggtgcccatattggagcctccaggggggctgtgcacaggggattccatccttgtgaaacaacccatccagagtctgccaacatccaatggaaagatcaatatgacaccaccaggatctagggacttgacaccagcaagacctaaacatatcaacacagatgaatcagcagagaatgaaactgtaaataactttatgatgatgatagagaccctcaaagaggcaaggagaaaatcccttaaagaaatggaagaaaaaacacacaaaaaattcaagaaatgaaggaaaagtcaaaccaaaaattgcaaaaaataaacaaatctcttaaagaaaacaaggaatgccatgtaaaaacaacctttctctgggggaccacgtatgtctctcttagaaaggacatagtcagcaaggcaaaacggcagcccacagaatggtaaaagatattcaccaacctcatatcagacagagggctgatctccaaaatttacaaagaactcaagaatctggtgtccaaaacaccaaataatcaaattaaaaataagtacagaatattatttttattaaattttattaaaaataagtacagaaataagtagagaattctcaatagagaagtctaaaatggctgatagacacataagaaagtgctcagcatccttaggcatcagggaaatgcaaatcaaaacatctctgagatatcatcttactcctgtcagaatggctaaaatcaaaaacaccaatgacaatttatgctggagatgtggggaaacgggaacactcctccacagctggtgggagtgacaacttttacagccactttcaaaatcagtatggtggttcctcaggacaattggaaccagtttgccacaagatgtatcaattccacacttaggcatataccaaattatgcaaattcatacatcaaggatatctgttcaactattttcatagcagcattatttgtaagagccagaacctgaaagcaaactctatgcccctcagctgaagaatggataatgaaaatgtagtgtatttacacaatggagtactactaagcacagaaaaaaaaaaacaatggaatcttgaaattcgcaggcaaatgcatggcactagaagaaaacatcctgttacaataaatctttgtgccaggtgcttgagttctgcccaccacatggatggacaaaataattcagagacttatattaggaacacatgctgcttggccaatgactaggatttctccactgctagctcagtctaaattatcataaatctatatattttataaaacttatcttatcagacaccttctgttggcatcctcatccctgggataacatgggatgcctatatcgccacctctttactacatttcccagagtcctccttgacttctagtcccatctaacttgctgccttgttggctaaacagtactttattcaacaatctataagatgaacatacacagaatacattccccgtcatctcttcttttctgtctaaatataaagaaggataacttatcttttataataactgaagaaaattataaccataactatctgtcttcaattctatcaaagaccacagaaggataatatgtaaactctagaattgacagagtcatctcgctacctggacagttacccagcagtcactttcttgaaggtcctgcatgtccagtttatacagcaacaaacagtccaggcaagagcagtttcttgtccaaatggctaatcttgccatgttgaaagcaaactccatagcaagtttcttcgatgcccatcatcctttctgatgtaatccgtgtaccagaagcagctgtgtctcattgcaagggaaacctaaaccattaaaatgccatttattctgtaggtctttgaaaggtttgaagaatatctatccatctcaaatacatctctgtatatctagaaaacctaactaacctaattataagttctattatatgtgactatataacctgtatttaattatgtatatcattttaaaagatatgtataaaaacaatacctaaacaagaggagacaaatacatatcacaaaattgaccttaaagttgcatcaataaatgaaaatccatagcaatgcacagaattcattcctatatcatatttccctttaaaaagagattgactaagctcattactatttataaccaaccccatttaaatgattgttgaggcatctactgtgacaggtcacaagttcaagtctcagtttgaatgtttggaagacaatttacagaatagggttcacacattagataggttcattcggtcggttgctgagtcatcgacctcaacaagtgacagacttgagtttagattccgatatttagaaggcaatttccatgccatccagatactgtctaacaacaaacatattaaagagttagaaacacgtgtagatgtaatagagaaatttactaattctctaacgtgcttggaatcttttatgatgcaggaaattgaaacttttagtgaggatattatagctaggctgaaagatattgcgtgactacaagagacgatccattgtccctatggtcaagatatctttattgagataaataccagccaaacacaagccagagcatgcccagggcagcctagccctaccattaaagtggcttacagatgaaactgtttggattggacaatggcctatgacctctgagaagctagaaactttggaaagactagttcaggaacagctagatgctggacatatagagaaatctacaagcccttggaattctcctgtatttgttattaaaaagaagtcagggaaatggagaatgcttgcagacctgagagccatcaataaaatcgttcaacctataggctctctacagcctggaatttcgttgccttccttgattcctaagggatggccgatcatagtcattgatctgaaagactgttttttcacaataccattacaagaaaaaaatagagaaaaatttacatttactgtaccaacttttaataattcacagccagttgggagatatcagtggaaggttttggcataaggaatgctaaatagtgctactttgtgtcagcactttgtacatcaacctttggaaataatttgtgagaaatttccacaatctcttgtttaccattacatggatgacattattttatcagattctaataaggaaactttggaacatatatttgaaatggtgaatgaagttctgcctcattgggggttacaaattgccccagaaaagatacaaagagtagattctatgaattatttaggttacaagatagatttacaatgaatcaggccacagaaggtacaaattaggagagatcattatcaaactcttaataatcttcagaagcttctaagggaaatttctcaactacagacgattgatggtgtaggacatgacttaaagcatttaaaaatggcccttaaatgtgataaggacttaaacagtctgaaaatattatctgctgaggtggaaaacgaattacaatgggtagaaaacagaatattggatgctcatgtagattggataaaccctaatttagactgtattctggttatcttgccatccagagaatacccttctgtgattctaatgcagagggaatatgtcatattggagtggatatttctgccacataaacagaataaaaaactaaagacatatatagaaaagatttctgatttgattctaaagagtgaattaaggctctgtcaactgactggaaaagatccagcaaaaattatagtaccttgaactaatgaagaaatttcctccatatggaaggataatgaatattggcaggtagctcttactgacctttggggaacaattagcaacaattatcccaaaactgacagtattaaattcataaaaatgacaatctggattcttccacgtattgtatgacaaactcccatttctggggatcttaccttctacactgatgccaacaaatcagataaggcaggttataaagcaggtgaggtaagtaaagtagttctaagtccgtatacatctgtagagaaggcagaattatatgcaattctcatggtacttatggattttacagagcctctcaatatagttacagattgtcaatatgcagagagagtcatgttacacattgagactgcagaatttgttcctgttgatacagaattaactttctgtttgtacgattgcctgaccctatcagaaacacaattaatcccttatatataactcatatcagatcccatatgggtctgccaggcccactaaaacaaggcaatgatgagaatgattgtttattaattggaagtgtgctagaagactcagaatttcaaagaaatatcgtgtaaatagcaaaggtttaaaaaaggacttctccatcacttggcaacaagccaaggagatagtgagaaactgtcctacttgttctttttataatcaaactccattgccagcaggctgtaaccataagacattcagagaaatgaggtttggcagatggatatcatttactttgcagaatttggaaatttgaaataagtgtatcatactattgacatattcttggggttccaataggctactgttcttaactctgagaaagctgattctgttattacacacctgctagaggtgatggcttttatgaatatatctgcacaaataaaaactggcagtgcaccagcatatgtctccactaaattggaacagtttttcaaatattgtaccaaacatatgactggtataccacacaattctactggacaggcagtggttgagagatctaataggacgttgaaagtgatgctccataaacaggctgggggaacaacacccctccaaacataggttacataatgctttactaacagtaaactttcttaatgccaatgagaaaggacatacaggtgctaaaagatactggactacagaaaaaaaacctgctaaactgaataatccagcatacttcaaagatgtactaacctctgtatggaaaccaggacatgtgttacgttggagaaggggttttgcatttgtttccacaagagaagaaaaactttgaataccatcaaagttgatcaagattctagttgaaaaggaaaaacctctcaatgagaagagaggacaggtattctacaaaggtatatttcataaactgaattgaaacctcatagatgaaaaggaactgttttgtttttcttttcacaggaaaactcattcccagaattcaaaggtcagtacatgggtaaaagactctcgtatagatagagcttttattatatcacatataaatgtaaaaatagaactatcacatgagctagtataatgtgctaaagttgttatataataatttatgtaccatatgttaccacaacataaagtttctgactagctgtaattgtgctctatatgtttgctgtaagtaagaaattttatgtggaatagttttgaacagtaatcttgcccaattcctgatgctgaaacaaaataattcactcattatacattgtataaaggggtttccatggctcataattcgtcagatttttagagcatggtgggtgctcagttctgggaatgcaagaagccaggcaccataacaaagttagaagtaccaggagaagaggtcacatggacatctaggaagtgagacttgaagacaagtcagatgtgcttttatcttactgttatgacaaatattcttttgcaaacattacttacaaccatgtttgacctactcctcaaatacaccattagtccatttagtggtttggttctcctgacctaagaacttcaccaagattccatttcctacatgttccactatttcagctctgtgactctggacaccatccccaagcaaataggccttgggtcacaggtcacaattaaacagtagcatatgcatttcctccaatcaaattgccagatttttttctaggaatatatggatacaaatttatgaggtagagaatttacatctaattttttctcaattatgatattctacttactctcttatagggaaaatatgtgcttgagatgtttttacaatttttggtgactatgttttttttttccaattgaaattttatatattcctgagtgttttaaaccattctattaatgctttgccacttttatattctgaagatataaactcccatgttgaacttaagtatgatatagggggaaatatttttaaaattgcattgttcataatgtttatgatgacattatgtaactctgtatacagcagctttcaagcagatacaataaagattagttttgaagaaaacacagcacaatgacttattctccagggtagaagataaagaaagcttcagtatttatcctaagaatgagaataagagaagggtgttggcatgttatgatcccatagttaagaaaactccctggaggttttggaaccatgtcaaatttgagatctttgcaatatttgacttctgatttgacaaacacctgagttcatggttaacgtagtctctgccctttcctaggaaaggtcatccaaaaaatacaatcacagaatatataggtgagcaagatggaaaagcggaattaaattttcattcagactacaggaatcaagcagtaggtatgatactctaaattgtgtgtattgttttgctttaggttcagtattaaaatagcatgaatgttggtagttatagccttgattttattgctaaatttattgtcttaatgtgtagctttcctatttccagcttatttggcatcttgataatatggaactaacaaaaatttaaaagaaagaaatatcagaagccttatgctgtgcttgtgacagaagcagggacattacatgtggactacatactttctacggcaacctgaattgacaaataaataattattaaaatggtgtgtatgccgggcattggaggcacacgcctttaatcccagcactcaggaggcagaggcaggtggatctctgtgagttccggaccagtttagtctacaagagctagttccaggtcagcccccaaagccatagagaaaccttgtctcaaaaaaccaaaaaaaaaatttttgtgtacaggatatcactttaacataatatttataagggggtaggaaaaagatgctgattacacatgcttgcatttttagaagcacatattttagaaattttgagcattttggtggaatatgtgtgctctccatagttatgaaaggaggccagggtagatgtggccagacaagatatattggtactcacagcttctacatatgaaagctcattcacgctgatctttttatccatctctgctatccttcatattagccttcactactctcctcattctgctgtcaaaaatctaaagtgctttgaactaattaactcatttaaagttattgataaataaattatatactaacctgggtctttcaggataaattccaaagagacatcagtgatgtttattagcaaacaagacagaattattttattgttattaatagccaaggtaaagacaaataactttaatgatttatattatcaattttaatttcatctaagatgttctttgagaggtatggagttcatctaagactcatcatataacatgaaaactttcagttatggacataatacatttgctataagctgagtcaatacacttctgttagccacttcatgacaataactgtttccctgcaggtgaaaatgtggtggctgctgagtacaatgtgccttgtccatgtatgtggaaacatattttgtttatttgaaacaaccatgaatcctgaagtccacatgaatgttgtaagctattcttatcactaataaaactacatgcatttgctttatctctgttaacttcattcatcttttctgaatcagtgtatctctttaagtctgaacatttaccaagattgaagacttcattccaagaaaaaagaatctattttaagaatcaggaaaaatgactgagaacaaaaggattcatgaaacttattactgtgttttctctcctagagtgaaattattatccgttggggttatgcaagtgaagagtatgaggctgtgactgacgatgggtacatcctcccaattaaccgtattcctcatgggaaaaacaacacaaatagcacaggtaagatctgagtaaaacaagtattgaagaatcccgaggaaataacatgcgttaccttcaaattgagtaatttcaaaggaccaattggagctccttgtctcccagaaataaggttggggcctgaaaggtacctggtttctattggcactttgaagactgagattctgtaggagtggctcttcttatgcacagtgaatattggttaatattgactgacataataaatggaatgaagtcttagcacatccctgttccttcatttcaaaatcttttcagttctattgtgactttggaatttgttgatttcatgttcaatggaagctaatgctgtaaaacattttcactgttgttttggcaggcccaaagaaagtagtactttgtcagcatggcttgtttgcaactcctggtgtgtgggtttccaatcctcccaacaacagcctggccttcatattagcagatgctggttatgatgtgtggatggggaacagcagaggaagtacctgggcaaaaaaacacttgtacctggacccaaactctaaagaattctgggcttttaggtaggaaaaaaactccatataacactacatttgcctttgagagtgtcaaatattttaatagtaaaataaagttgtgggactggattgaaagcatttcacttggagtgatattttagattgatttgagtgacatagtttaggactttggattgtggttactatgcttaataactagtataaaatgttcattatagcctatatttctactcttgaaattgtcatttttttctaatcaatccacttatcttaaaaattatacttatctcatttgtgtgtgtgtgtgtgtgtgtgtgtgtgtgtgtatgtgtgtgtgtgtgtgtgtgtgtgtgtgtgtgtgtgtgtgtgtgtgtgtgtgtgtgtttgtgtttacaaatgatttgctgcatgcttggaagccaggaaacaacttaatggagttggccctcttcctcaaccatgttggttctggcgattaaactcagggaaaccagcttggtaaatagtgcctttgctcaactagtcatctcacaggcctcatccatgtccttataaaattgattcactgaagtaagtttgttgtatttaaaacactgaaacattgatttggcaaatatagaagtatgcatacagccattttgcattatttttactttgattgtgtatccgattatgagtgtgtgtgtgtcgggggaggggggttgctgtgtataacacatgtgtatatccatgtacatgtgtttgtgtgaggatcagagcacaaattcagtttaccttctttagacataatgtccactgtggaaatcactgacctgaagagactgactggtcagctaaacccctacgatatatttatttctgcatctgtattgctaggatttcaggaatggaccagcatgtctgcctattttttttaggtgggttctgcagatatcctccttagctctatattgttgatatcttgtgagtggaatgagtaatagacaagggtgaaaagacaagggtaaaagaacatatgagtgggttggctcacagagtagtagaatatctcctgaagtttattctcatcaatttatttaaacaagttctatcacatttacatcattgtacctctaacaacctctctctctctctctctctctctctctctctctctctctctctctgcatgcccttgacctcttctctctttgttggggattagcagagattttacagcttgatttccaatcttaaataatatgttcatatggagaacctagaattttagaaatttagctctagtgcaaaggtgttctgaattatgtctaacagttcatttgctgtggacatagcaatgctagcttaattcatttcaaagtgtatacctgtagatccacaccatgggaaatttgtcaacacagaatagtggtgattatagagcggtagcagagtaaccttgcaagtagtaattgtgagccatgtctcacaaatgcctcccttcatatagactctataaagacatcatttaaaacagaaataatttatttatagtttaatatttggatcacattttgtccattttgttttcatgcagttatgatgaaatgataaaatatgacattccagccaccattaacttcatcctgaagaaaacaggacaaaagcaaatttactatgttggacataatcaaggcacccttattggtatgctaacaaagaacaaaattagacaatgctgaaattttattctgaagaacacaaatatatatgcaaattttgctactatttgtaaaacacatataagctctttgacagctgataaaaatgtaacctgctataaaatgccaaatgttgaaaccataatttagttaaatgaagtgcatgtgtgagatagttctaagtttctctgtagctagaatttttgatacaaatgacagactgtgtgaaggtgtgcacgtacacatgcgcatgcccgtgtgtgtgtgtgtgtgtgtgtgtgtgtgtgtgtgtgtgtgtgtgtgtgtgtgttcttcctcatgtgacattgtacatgtggaagactggtgtgtcaattctgcttagaagtttaaagggtctggctccactgagctcttaagttttcttctcttggtcatttctcaacagctttattggcattgtatgagctagtacataatatatgttttcaaagaaaaaataattctagttctatccattttcctgaaaatttcatatgtcattgttgggtatatgagctagcttgttgggacccaatccctttgtgggggtaccatgttcagtcttaacacagaaggcaggggcttgggccttccccaactgaatgtttcagattttgtcaactccctgttggagaccttaccttttggtaggaatggatggaggatgggctgggtggggctaaggaggagggctggaaggaagattttagttggaatgtaaaatgaaatttaaaaaataagtaaataattttttttaaagtaccaaaggagccaggcattggtggcacactactttaatcccagcactcggtagactggtattaaaatcactgagttcgaggacagcctggtctacagagcaagttccaggacaggctccaaaacaatgcagagaaaccctgtctcaaaaaacaaacaaacaaacaaaaaggacaaaaaggatagatgtctgactgccaggaaaattatttctaactaatgtatgcatttgttcaacatagagtatgatagatagattattaatagacagattgattatagatatctaagtagatagatttgtatatatgtgttcacctgcaagagtgggctggagatgatgcagtagggtgggtgtcttctccaagagtacatttttcacaagtgctgaactgatccttaaatatggtgagtctggctactcaaaatagcgaggagtcaataaatcataaacagagttattcccaacaaattaaatggaatttaaatgttttaaagtcataacaattggtgagtaaacaaagggaaatctccaaggcaaattttaaattcctgacaaaaagaaggaataagctttgtgaaacagcctaaccacacagacacttttaagaaaaaaggaatgaaaaaagaaaaactcttcttatttctttcagccctgggggcattttccacaaatcaacaactggctgaaaagatcaaaatgtgttttttattggctcctgttgctactgttaagtatgacgaagattttccacaccttctatcttacatctgtccaacatctttaaaggtttgtgatgaactcaaagtggtggtataattacactttttaaaataagcttgtaaaagaggagttctgcctgtacaaactagtgctgattcacttgcatgaatagcctcccatgattggctacctcaaagttgggcagcttgagttttgtcctatggactttcttaagcatgattgtatttttctttaatctatagctgcttcttactaatttaactttatttttaagaatttcatatgttagtattgtatatacataatttccatccctccctgtactcccctaacttctcctatgccccttctccctctcaaattcatgaccccctctttaattgttttcattacacacacctgaacatgccttctaaattcattcagtgttccttgtatgtatgttcatatgtttaggtttgatcactctgtattggatgatcttttgaatgtttcatattgcaatttatcttaccttgtgtttcactttcaagttttctatcactggcttcttaaaattgccatactacattttgttagttatgtgatttcttttacacttgcattcaacttgccagtgtatacactaagttctcttcattattcttgatatcattattttcattatatagctactgccatggcattgtagaactgttaagaaatgtgtttactaaagataaaatcattgcaaatatcaaccttcaaggtgatggcagtttttattttgtcagtttggatttcatcttacgacactatcaggatgccaagactatctatgatattgcttgtcaccatcaaagtgtgatggtaaaatccctgtacatccttgccatcacttatggttcttaagtacttttcactctatgcttggtttagaccaccaaactgtggtttcatttgtatttagttgtgactgaatgtagggcaacttttcaagtgtatccttccacttatacaatcaatgtccctttattattgaagacttcgttttgtgtttttatttccaactattttaaataattgcaccagtgtcttgtcttgaaaatgttcatgtcattttagaaagttaatccatacatgtaaatgcagaacaaacagaactattgtaaattcatggccatcctgagctacataggtagtacctggcaggcataggaaacacagtaaaacttctcaaacatagaaaagaaaagaaaaacattagaagcaagtaccttctttacctcatttataactctcatagccttctggggttctgagaagctagttaggcattacatgttatgaagaactttgtagtattctgggatgttagctattctgaatcacctaggtttgttctatttaagagcatacatcatagtttaaataaaaaaacacaagaaaaacaaacaaaacaaataatttgttcattgtctctgtctttcatctctaatcaatttgatcacaccataatgtatacaatatataggttatatccaacgcattatccactcttagccatcctcctcactctgaattccaccgtctttcaattcatcccacgctgcttgcatagtctattttttgattcattgaacctagttgagtatgtttcatgaacatggtaagggtctgtgtagagatagcctattcatcccagaattttgtgggtgaccctgctcagataccccttgggggagggggtaagaagaagcagcaccaatgactcaggcactgggagtcagtgagtagcagagcatgctgcagactggtttaataaggaagttagacttgactttatactccctcccaaggtcttattggttcaggtggctgactgctatattgcccttctgcattggtgtctctgggtcaggtgtctcttcttcagcagtctctgggtatagaggcaggcttggctcagggagaaagtgcctcccaggaatgcttacgcagactgtcctgagcatctgcggcttccgtaagttgccagtagtttctcctacacttgaacaacatgatagcccctctcctggtcacagatttgttaaattgtctttttctgtttaaaagattgcttgtattttattagattggcaatcatttacagaataaatgttcataaaatcagcaagagaaaatattctattatacattgaggtgcaatacatttatctacaaaatattctgtctatgaactttttgtaaatgtatggtttcatagtctgaggatgttagcttctattagttgtcatcaataaattgttagtggacattattgctgagtgctttttctacatacattgagatcatgcatgatttatttttactctgttaacatggtgaattaccaatttcctgagcattaagataacatttattccagggacaaatctcagttttaaaatgtattatatttctataaatcattttctattttcaccagggaaggcagggcaactagcatcacatttcaaaaatcttaacatttacatttattctctagttaatttaatttatcattgagacagcatttcatatattgtagagtgaccttgaacttgctgtgtaattgagaataactttgaactgttctttatcctctttcctatgcttgttaaacaatggaattttggatgtgtgttagttactatgttggttttatttagtgctagggatcaagtcatctgagctacacaactagctgtcatcttcatttctgtgaagtatgggttgtatttccttttctctctcaatttagggatagaataaaccagcctcataaaaagaatagtatatatttcacctatcatgtgagtatgaaattttcctagctggaggtttgactataagatcatttttaaatggacacaaaaatacttagattgtccacttttaaatgattaaacagacaatttgcctaaattctgtggccttattttatttgtgtcactcactttatcaccacaaagtatcccctactagtctactaatagttacagattgctaaaatgtaaggttagagaagtttaattttactctgtaggctattccagtcgaatcactacaaaaacatttcattattgtgcttcttggatacaggcttatctcagaccactcagcaatctcaagtcttccctgtgattcattccctagacttgaatccctttcctcaaatagatgtgcagtccatagttagcagaaaatccaaggagaatctctgtagatctttgaataccatgtccttctcctctgatggaaaccttagctgccttttatttctccaaatttcattagctcatgaagattacctaacctggaatctctttaggcagcaagaggctaggtggatcactctgtttattagattcagatttttcacatattaccatgtctcacagttaatatcaattgtttcagaactcttgtttttatgtattttgtgtatgttttcaacaaatgctagcggctatcatttcaaatcacagattccattgcctcatttccccaggatctctaatcacttgtccatctactacagttgctgatcctactcatttcatctaaatggaatcatgcactgtggtgtcatatgttgactctctcagttgaagtaaatgtgttagttcacttgtggtatttattatagatacttctttataaaagaataatagtttataaggtgaatgtaccatactcaattgattgctataaccactactgacaggagttttcagtgtttttcttgttttgctcatttacaagtttttgtgtggacatgttttcattttattgtatacatgcatcaaaatttccacacactgtttaacaagcttgctagtcattaaccctgaataacttttccacaaggaagaactagaaagactgcaagtacaccacaatgttcatgattctcagaagttttcattcaattgaaagtgcttaaaaataatcatatgatgctttttctcaaattatgtgctgaacatcttaacagtgcactaagtcaatccccgcttaagtaacatagctttgttttatgtctttcacatcctacaaacattgtgctagataaaacacttactcagactaacagctgctcttcaaatttgtcaatttcagctcatttttggagaaaaagaattgttacctatggcagttttcaataagcagtctggatatacatgcaatgttattgtaaccgataccacatgttttgctataaaggtattgataactggatatgtttcacaacatttaaataaggtatgtgttgtgcactttcaaattcgctatttttcatgctgataccataacaactctatatggctaattaatctttagtgtttagcatgattatattaaagtcaagatgtgttttgtatgtaattcccaagttattaacctgccaacatagaaaatgtggcatgcaccacatatgaatgaatagctgggtgtcatgtatgaatgagtttcatctttcttctactcactccagtctaatgcatctgctgtcattcatctggtaactgatcattcagtttagcaattctattccagaactaaggatatttccacataaattatcatctaaaatatgaatcattaacaaaaggaaattctttaagacataaaaagtgaataaactgactcattttgttaatatctaaactctccttaatctttgatcatagcatattatgtcctttaaaaaaatttaacatcaataccaacaaaatatatgtgtatatttattgttatgataattagagtctgggttgcgtattccagccttaatatgaggggatatgcctagtgttattgcaacttgatatgctatgtttggttgatatcattgggaggccttcccttttctgacaggaaacagaggagcagtagatctggggagaaacgggtagcagtgggactgggagggaatgagggaaggaaaactgaagctgggatgtaaaacatgagagaaggatagacagacagacagaaagacagacagacaggcaggcagacaggcagatgatagatagatagatagatagatagatagatagatagatagatagatgtaattaaagtcaactattgtgagacactcacacaaaccattggtgttcatgaattctacttaataaaacccagtggtgagccctgaaatcaaagacatacaagtaatataatgtggcttgaaaagtttagagaaaatgtttaagaatatataacaacaattaaggaaaaataatccaggtaatgactatgagagagagcaatgcagaggggttgtggtagggaccaggaaaggggaaaatcataactgcatttaaatttcattttttttaaaaaaaactcatattaaaacaagaatatcgctgggcattagtggcacacgcctttaatcccagcactagggaggcagaggcaggctgatctctgtgagttagaggccagcttcatctccagagtgagtgccaggataggatccaaagctacacagagaaaccctgtctcgacaaaaaaaaaaaaaaaaaaaagaaagaaagatagaaagaaagaaagaaagaaagaaagaaatgaaaagaaaaaaacaagaatgtctagattattcactgtactcaaaatccagatttacttataaactgattggagatatactgaatcagtgttttacatgcatttatgtctgtatacactctggcaaacataaggtcattgactacctaggaactagtgtgatggacagttacaagccaccatgtagatgctggaaattgatgctgagtccttttcaagaacattatgtactcttaaccacttatgtgtctctccagtccttgaagatttatttttataggaataatacagcatgactatcttgaaagattttctgtggaaggaaaccaaagactgacaaatgtttatggtgtctgactttctcttagagccgtactgatgtgtatataacacacagtctagcacgaacatcagttcaaaatcttctacattacagtcaggtacaaattttaaaatatgtctcttttcttctgcttttgaaatcctccttcttcataagtttcagaaaatctttccccagtagtttttgtggtcagggcattacttccttttgatggactaaaagaaacttatcagtatatcaaatcttttcaagaaaatgtgataatcacagagtggtcatattattttatcctcaaaaagtaaatctatatacatacatttttggtaaaattgttaccagttttagtaagtaatttctcagattgatgcaggatgagaattgtggtgtccttttggtctatgagtaaactgtgatagctttcctatctacctatatgacagccaagacacttcatagaatgagttcatcatactaatgtcatttgacaagatgtaaactggtacctgcacatacggagcaagcccatctcaacttatgagggtgttttaaaattaccttcaaacatataatatttatgcatgaccattgcataaaatatgatatggaaatttttattctatcaggcaattattgataaaccattatatatcacatcctaagaagtacttctttatagtgttttgttgacaaaattttattcaggattctgcaactctcttaacatttccactttgtgttacttacctctgaatactataatttcttatttttttaaatacagagattacgcaacatctatctttttgaatatttttgaaaattcttgtgttgtgtaatattatagaataattaagtaaataaaattagagatgaaggatataaaccttattacttataaaatattaatgcaagtagcaaccaatgtactatgcagtatattttgaattcatttgaattatagagaatcaacacaacttttacaagtagtaatttgagacttcatgtattttatttttcttataggctttaatttaaattcttatgaataaaaacatttgataattagaaatatttgtaagtggagatttactacatactacatactatatcaaaaatgatacatcagttttgcatccttaagtagctaagcttttatctttcatgaatgatattttattgactttcttgattgcagtacgtatgaattgctacatgttaaacattttatttgagatgttaaaaagtaagctttgttttaaattttcttttgtgcatattcatgtaatgtgtaattttctatgactgtaatttagtagccattgatgaggcagtatataacaatgagatagaaaatgcactgagtttgttggagccaatgtctcattgttataaaaagagccaatagaactcaataacttctggttatatcataacgtaaggctttgcaagtaatcctattctttatctttatttaaggcagttaatacaggtgtgtttggggcttatgattggggaagtccatctctaaatatgctacactacaatcaggtaagtctttttaatccacatttaatgatctggtccctacaaaaggtatatactataagaaatttaaccaaagtcttttttaaaaaaaataataagacacgggtacattttattttccttaggaagatacaccacacagaactttgggaaaattaaaaacaaatagcattatcttttgtaagatgatactgtgaaaccaatgttttatctatcatagtatctgaatgtcacaaaaccatgtgggattaatcatataatgatataatcatttcacatgtaaagaaccaaggctcagagaatttaggacttgtatgatttcaaatttgaataacagtgcactacaaactgggtgttgtcacacatcccagtcaccttagaattaaggattccgagagaggaggattttggcaagaatccagcataggctacatagaaaatactgtctcaaaattaaagtaaataaatatataaaaatgaaattaattttttcctgtcaaggtctaaatcatcaataatttctatggagatagtaagcacaccattataattatcctgtcacataagagaataagccatcaataacagtcatatatttttgctaaactctttatcactttccaccagacaactcctccattatacaatctggaagacatgaaggttccaactgccatgtggagtggcagaaatgactttttggctgatgacatagatgttgcacatttggtatccaaacttcccaatctcatttaccataagattattgctgattttagccatcttgattttgtagtgggattgagtgcttatgatgaggtgtccaaaggtattttaaaacttcttcatgaatctgagactgaaaatttgcattagctttttgcatgtgtttcaaacccctcggaaactttcttgctattgtaagtgcagataatttttgcttggcctttttcactttaattgttttttttatttttaagctatttcttcatttattggattttatttttactagtgaaaaattatgtgcatcaagaaaatgcttcatcttgtgactgtttcttaatgaatgtatgtttttaaaaatatttttgacatgagtgctcttgaagagaaggcctacttttgatttgcattgataaaatcctaaaataatgatgtctggagaacaaactataaaatgtttcatgtaataggaccaggactccatagtcctgttccttataatccacaagtcttattcactagtctcagtgcaaggtccctaccccatcacaacctgtgtggaccaggtactgttttgtataggtcactctgtcaatattgtctggtttgagaataagaagaaatattacaagtgatctgagtcatatacagagataatttacacgattaatcattcatgacagcccctgaataatgtggcgttaattatacatatatgatctggaactctccttacaacctaaggtgactatatattttgtgtgtgtgtgtgtgtgtgtgtgtgtgtgtgtgtgtgtgtgtgtaaaaaagagagagagagagagagagagagagagagagagagagagacagagacagagacagagacagagacagagagacagagagagatgttccttctgttctaagttcctttaggatttttatttgaattagtgttggacttttatgaaaatactttctccatatacaatgatcatatgatttctgtactttagtccatttatgtgataatgtattacatttattggtttggaatatgtcagaccatccctgtattatttctggaataaagtctgcttaatgataaggaaattttgtttcttgaaatattatttttattatactctcatacattatatcccaaaagccatttccctttcctctacacctcccagaaccccctccctacttaactcttcccccaaatctgcttcaagactccgagggatatcaaccaaacatggaataacaagttacaataagacttggtacaaaaatcatcctgaattaggtaaaccagactcagaaagacaaacatgatatgtaatcaagtttaggtgaacattagctgttaagtaaaggataatcatgttaggagtcacagacctagaaaggctaagtaacaaggatggttctgggggtggaacatggacctccctgggagcaggaaatagaatagattttgtgtgtgtactgggagctggttgggacaagaacaccggataaaggaatggagcgagagagtactgggagagacaaatagaactgagaacatttggtggtgatgtggaaatctagtgcagtagaaattccctgaaatctatgggggtgactcaaatgaagagtgtcagtaatgaggtatacagagcctaaacctgccatcttctgtaaccaggcaaagcttctagtggaggggttgggacacccacccaaccacaaaacctttgacctataatttgtccagcctgaaagatgtgctgggataatggtggcagagaacttgtgggagtggccaacagatgactgataacctgaaacccacaccacaacagggagcccatgctgacactgcctggagggttaggaatcagaggctagatatcaatgaaatatttactaatgatattctgttacattaatttttgagtgcctataacaattatcagagaggcttcatccaggaactgatcggagcagatgcagagacacacatccaaatattagaagctagatgggaaggaatgtaggcatcagaggggtggaggacaacataagaacagaataaactaaacttgactcatgaggatctcagaaactgaaacaacaatcacagaccctgcatatatgttatggtagtgtagcttggtgttctcgtgggactcctgacaatgggagtgtgtgtgtgtgtgtgtgtgtgtgtgtgtgtgtgtgtgtgtgtgtgtgtgtgtgtgtgtgtcagggggatgggaatggtttctctgacacttttgccagcctgaaaagcagtttttcaagtattttcattaagaaaattttcatctatgttcatagggaaattagatttataattttcttctccttatgtctttatctggtttgactatcagggtaatatgactctatgaacataatccgttatattctaagtgttctttgtttcctattttatgcaccaatatgagaacaattgatggtaattcttcactgtagaactgatggaatttagtaatgagtgcatttaggtatctaataaggattttattttcattttattgagaattttcagcaatgctcctattttttacagatttgttcaaattatctcatcttggtttattcaaggtagtttatgtgtatttgaaaagttgtcttatcttacagaatattccagttgagtgaaaaatatgccctaaattttttctaagtttcattggaatcttgtaacatgaataataaaattccagagacagttattgcggtttaagctgaatatcataaaagcaaagcagccaatccaccagagatctctcacctctaccatagctggagcaatcctgtcctcaagatggctggaggctaattgccaggtctgagaccctgctactgtcttatataccttctagtgctgggattaaaaatgtgtaccaccaccacccagcttctacggctgatgtggctgctgagattaaaagtgtgtaccccctactgcctggcctctacagttgtggcttgcttggcaatctgatccccaggaaagctttattagattatataaaatgtatcaccacaatatccctattttgtctaatacaaaaagaaggctacaactaataaaagaaaaacaatgtataataattacaacaactatatacaacatatacaaccaaatatatcaataatgtctagtccatttgcatttgacaaattcaaagaaaataccccattatttatcctatcttggagagtccaaaaggttgtacctaatttactttctattttaatttgcattatcaaattatcttttaatgtgtcccaaactttttcacttttcacctctttactgcatttcttttctgagacttgtgaacaaggaaatatataaccataactatctagtcttcaactccttaggagatccaagaaggaaataatattaaatgcataagcaggaagtataagcaagcgactttcaaaaaatgtgagaaatcatagaaacagctggctgcctaaatagtcaccaaaagttcctctacaacattgggtcatccatcttcagcctacaggcctaacatatctgacaaatttttctgtgaagtaggatgttctgaagggcttgtcttggcaaggtttgacagccacttttatgtcagcttgttcaatttggacagcacaccctcaggagtagaggcaagttcacttaatttcccacaaagaaagtaaactccaggtggagtttctttgatgctcatcatcttctctgaagtagattggtacttccagtagcagacatgtttcattgttcaaaaaaagagcccatgttattagaacatcttaaatgtcatattctgtggatctcagaaatgtttgaagagcacctgtctttctaaaatacatctctgacttcgataacatagctaaaatgactacaattttgattgtaataggtaactaattacaaacctgcatttccttattattctgtgtagttgataataataattttcaagaactataaatttgacttggttggcttgggcctgtttcaggccagattcctatgccctacttagggatacctgaggcagggggactgctcacagcagtggacccagagactgccaacggggactgctcacctataaaaagacacaggctagcaggatggataagaagacatgcttatgctgcatacaagaaacacacttcaacttaaagacatatattagcaacatatgactttagtattcctctgtgttctggccctatacattggaaccatctcgtgttctgttttacctgataaagttccagtccctaagagttgaacatttacctcctgaagaggccaattagaatgccaagattcttttctggtttttactcgggatcagtttttatttctacaaacaaaaaaacatataccacaactattgaagctggtagtttgaagctttccaaacttagatacaaatattaattatagaggaattttgctaaatattgggctggatagttttatgtcaacttgaaacaggctaaagtcatcagagatgagggacattcaggaaatgtgttgataaggtcatctgtagatgagcctggaggtcattttctcaattaaagattaataggggaggcccagacaatgtgcatggggccatgcctggactggtggtcctgggctctgtaagaaagaaggctgagcaagtaatggaaagcaagtcagtaagcagcacctctccttggcctcaggatcatcttgtgcctccaggctcctgccctgcttgagttcctgccctgacttccttctgtggcctactgtggcagaagtgtaagcccaataagccctttcctcctcagcttgctttggtggtggcatttcctcaaagcaatagaaacccagactaagatgaatgtagattccaattcattgaatactggctggagaccgagtctctgtccccttatcagctctcagctgacaccactgggaatgccaagattcttgtgatataattgttatattgcatctgtgtctaccagacctgcaaggataacatcattcattcatacttttaattttggtatctgctcatttatagacatttgccaatatactcactttgtgatttttttcctcaattttttgttctctcttttcatagttcttctattatccagagcagtatgttttcttacactatgtattaggtactttcattgctctgggtagtggtttccatggtgacaggaaagaactgaactgaatttttcataggtttttgcataggggtcttcgagaggccccctcagataatttccagatggctgcaaaggattacctttgtgatctctcatcaacctacatcccattgtccaatgtttgcctttgccacaccatttgtacaatccagaaaggagggtgacattctgtttggattgtagttataaaaagaattgtttctagaaatgctttgtttataatcccttctcatgtgaccttaatgccacaataaaaacatttgacattttgatttttctttaaccctcctgaaatcacctctcctgtgtgtaccttcatcatagcatgaacttccatgttaatttcatctctggtacaatcctctaaaggcgctaattttgcttttgcattgggcattagcattctcataatacattgattcaatcattatttttctagaatctgagtctgatatcattcaatttaaggctaataaccatctttgtaacaagtctgtgaatacttcctttgggccttataaaacttttgtaaatggttctattttctttcctgcttctccaattctgtcccaagcattcaaagctgctgcatatattatacccaggaaattatcatcaaatagacattgcctttctaaagtagtataatctccttatccaagaatttgatcttgggagagatctctacctcaagctttagccttttgttcatatcattagactcttctctgaaccaggaagtacattgtaattgtggtccaggctctaggacagctttaatcaaatcattccaatctacagggataaccctattacaaacagatcacgtgtttatcatctgcttcacaaatggtgaatggactccatatgagactacagcttccttgaatttccccaaatctagcagtgtcacaggcttccaagtagctcttttagaatctgcttcacttccaataatgttactggatatattaaaggtgattctcataagaccttagagttctcctttttaaccagtaagtgcaatgctgaatttgtttctccatttaatttttcactctgggtttgagtatctctataatctgttttaataagtttttctaaggtctgcatcttggcactcatatcaaccaacattttcagagataaaccaagaattatcagaacaataaagataatgaaaaaaaaacaatagtgtatcaaacccagttaagttgattatcccttcacattcaatttttaagccatctattatgtaatcatctgaagatctaatttttttcattttaatagagtttccattttttagtgtggggtgaaatctctgtcttttaactaatccctttctttaagaattcctattaaacttaccaaatctgcctacaatgtcagtgaactgtaaggcttgtctgcattgaactagcttgtagcagtgaaatgagagttttagcctgaagagaggctctagaaaaacctgagatcctcctgagtctgggtggcagctgaagactatttagaaaagtagaactgaaaaaatcccacacttgctcaaagatttgaagaaaaacaatagaaaaccaagctgtcctggcagggactatggaaggagagactcaggtgggagtcccacctgctgctcaggcttgggccaggcctggtcccttggcctcaaaagaagcttttttgtgaattcttactttaacacttggcgtcaatttttaacacaagtaataaatgacaagacactgatattggggttcaaacttcaagctgaagttcagaaaagcaaagctgaatggctgaatggcctaatactgtctccatgagctttcaccaagcctcagactgtaacctctccacaatgtggctggagaatgaatccctctctgagaccttgcttctgttttatacacttccataatgttaagggtgtgggctataattctcttttagactgattcactcttgtatagatctgagtgtcgttaaattcacagacatccatccatctctttatcctgagtccaataattacaggtatataccaccacctactagcctgtgggattaaagtgtgtgcctgacttctatagctagttgttgactttgtttgctgaatatgcaggcaagctttaataaatcataaataatatatcactacacacctcattaaaaatgtaatgcaattttaaaatatagattaataatcacctgtaatagttaaacttacagtcatattaggtatactttcaatgttaaacagatatatttaaatatagatgctcttcaaacacttcaaagatctatagaatatggtatttaatgtttaataacctaagccttttcatgacattgagacacatctgctcctagcagcatcaacttgcttcaaaagagtatgatgggtatcagagaaactctgtatagagtttgctttcttaagggcaaaagctagccattggggaagaaagtgctcatgcctcaactgctgacagtatactgtccaaactgaaccagcaggaagtgaaagcaatggctaaactttgccaagacaaggaagtacaatccttcaaatttccctgctatgcaaaaatatctgtcagatatattaggcctgtagcccaaagttgtatgtcccaacattacagaagaactttgggtgactgcccaggtagcctgaagctcctgtcattacataacattacccctggtggagactttcatgcaattaaatattaaataattagacttaaagttttccttagttaatttaaaagggtaaattacatataaaactttagactcatgaacataagatacatagaattttctctaaatatgcaaaattcaaatggattggatattgtcattataatttttagttgataactgttttgttgcatataattttactatgttgatgttaaaaccttcctttttatttaaacaaaaagggggaaatttggaatattcctttatactgtgtgaatataggtcactctgattggttttaataaaatagctgactggtcaataatcaagcaggaaaaaattaagctaagtgggaaaaccaaactgagagaatgctgtaaaaaagaagggctgaatctgggagtcaggaacagacacagagagaagtaagatggacatgccatgacgaggaaaggtaccaagctatgtgacaaagggtaagaaatataggttatttaaaatgtaagagttatctagtaacaagcctgagccactgggtgagcagttctaattaatattaagcctctgtgtcattacttgggagtggctggtgagctaaaaattttgcttacgttttttgtgccaatgccatacagtttcatttactatagctctgtagtacaatttgaggttagatttggtaataccagagcagctcttttatttttaactatcctggttttaactatcctgttctttcttctctctctctctctctctctctctctctctctctctctctctctctctctctctctcgctgtgtgtgtgtgtgtgtgtatgtatgtatgtctgcaactctctatatgaagctcaaaacagtcctttcaatatctgttaagaattgtcttggaattttggtaggacttgcattgaatttttagactgcttctggcaggatggtcattttactatgttaattctaccaatccatgtatatcagagatctttctgtcttatggtgttttatttatttcttttttcaaagtcttaatgtttctatcatacaagactttcacttgtttggttagagataccatatgactttttaaagctatggtgaaaatttcttttccctatattctttctcagtccttttgttatttgtttattaagtgtttcctgaaagtatttatcagatataggagtttcccagatagttatgtaagctatcatatgcaaataaagatagtttggcttcttctcttcctatttgttacccccaaccccgcccaccactgctaccattgtatccaaatgatcccttccgtcttgtggctcaagctaagactctagagctacactgaataggaatggaaagagagtacaaccttgttctgttcctgatttcaatgaacttgttttgagattctatctacttgagttgatgtttgctatggtcttgctgtaaactgcctttataatgttgatgtatgtcattgcattcccaatcactccaggacttttatcatgcatggggtttggattttgtcaaaggtattttctccatctaataagatgatcatctggtttttatctttcagcccattcatatgttgcattcattgtgtgatagatcattcctgtatctttgaatgattcctacttggtgatggtagatgatttttaatatgtttttatttaaattagaaaaatattattttatatatcactcctggttccctctccctcccatcctcctatgctccccaccaacccccatcccatccctcttcttaaccatagaaaggatgaggccttcagctggggatcatgagtctgtcacatcatttgccacagggcctagaccctcccccatgtgtctagtctgagagtatccctctgtggggaatgtgatacaatatccttttgtacactagggataaatgctgttccactaccagaggtcccaaagacttcccaggtctcctaactgatacccacattcaggaggcctggttctgtcctatgctggtttctgaactgtcagtctgggctccataagctccccttagttcaggttggctgtttctgtgggtttccccagcctagtcttgacccctttgctcatccctccttcctctctgcaactggatccaggaatttgacttggtaattacttgtgaatctctgcttctgcttccttcagttcctggatttttgtcttcaggtcagtgttttttgatagtgattattaatgctatcatcttcttattaggtaaacattaaaatgccaattacttgctcatagaatatacaacaatttaactgacaaaatataaatagctcattttataaaatttggcatagtttgcaaacaatttctaaagttatgaatatggccataaaatccatctatagtatttatggatgaactaatattttttctcttatttcttttcaataatcacattaagattaagacttctttccagaaaaagtttatctccatcacatactatcatataaaacaaacaaaaacacttaatttccttgctgtggtcaaaatccaatctttctttttaattgattcagtaaagatttgatcataaaagtcacacagttctgcaatactattttaaactctcatactcttagaaagacaatatccccctctcattctcccagctctctctccttaccctcaggataccaattagctcaggaggtcctgccccttcccttctccagggtccatgcattcctctcttagagtccttcttgtttcctagttcctttggtgatgaggattgtaggctgctaatcctttgctctatgtctaaaatccatatattagtgagagggggaaaagaggcagggagaggatgaaaaggagtatcaggaaggttgagtcggggaagaatacaggggggatgaggtgggggactagtggggcgttaggggaaggggaaggagagggagaggggactgagatgtgaagccaccttgtgtctaattttaactaataaaaaaataatctcttggaaaaataaaaagaaagacactaaccatgttttgctatttcccaggtcgtattgatgtgtatgctgggcaaattccggcaggaacttcagttaggagtatacttcatttttctcaggtaaactttttctgtatttcaattccttttcccttttgtttgaaatcttccctccatgatgggttgtgtcaatactctatcttgtgataatgatgatgatgatgatgatgatgatgatgatgagagtagatagtaacaatgatatctctgatgccaagaggagaatcactgctctgtgcagaaattttcattgtgaaaaggattttttccattcttatgtcttctaagcagtaacttttattttaaaacttgtaaattttcttggtgatctgaggaagctggcctccaggagagatgaggttataaacccagcccagtccagaagcttttgaccatagagggtagagatgattggtgctagatcaggatatcacagatggaatgactgaacattgtgttatctaaacaagaaaatatatttaaatttaaaaacatagaaaactagtataaaccttgtttacataaattaatactgatttacaagtatcaggtattagttaaaggtagaaattttaggtgcctttgaggtataagcataaattgtgaaacctttccttcatacattttaatatctccatgacaagtaagaggaattaatttgaaattggccttaccctaccaaggccattgccaggatatgagatagtacctatgatcagaatgtatatcctcttatttggaatttcttattcattcatgggtattcatttttttaaaattcatgtctgagctgtagtctacattttgctctggactcactggtatgacgtttctggctcaattgggcaataaccataagagtgacatgtgtcagattttaacaagtattttgaactcttatcttgactggagaaatctgttaatcacatctttgtcctcccagcattcgaacactgtgaaaaagtcagtgtacacatgtctgaagactagactgctatgaagccctcattcctcattgtttttctagagctaaagcaattgggttttcaaaaaacagtgttattatttgacaaaattaccttcgtcataggaatcattggaaatattttacacaaaataaattctaagtgaatgagaaatagttcaattgtaatttatttctgatagaaatgatactttgtaacaggtgttgaagtcaattaaattttatttttaaaatgttttttccatagacatcaaaatattacctcatttcttaatgtatagctttattgatgtgcatttacataatttaaaagtgtgtgtgtgtgtgtgtgtgtgtgtgtacctgtgtgaatgttcttgtatgatggtggacaggtgtgtgtcagtgttttggaaaaaggatgcacttgcatgtggttaccagagaacatccctgagtgttgttttaagacactatgcaactgctttctgagacactatctctccctgttctgaaacggtctgggtagcttaggctttctgttgaaggccccaggaatctgtttctctgccttctgagcattagcatttcaggtaaaaaccaccactatctgttttttcgttcagtgtcgtggcaactaaatttaggtcctggtgccttcaaagcagacattatactaactaagattattctccagttctaaaatatttcccatttaacaattatttacattttgaattctgtgtttagtactaaatttaaatattgtgaagtttaatgttataacaagtttacactacaaaataacatgtgcaacactcatcccttatgaaatcataatactaaaattttcacatttcagtgtcttcctacatgtgataatatcatacatatgtactactatatatattttgtttgatttgttttttgattttttattagaatcaatcttattttacatattaattccagttcgttctccctctgatcctcccatgtccccccaacaccctctctcctccccttttcactccacatccattccccagggagagtgaggcacagcatttggggcagggcctaggccctccgctgtgaatttaggctgaaagagtgtccctccatttgtgcactaggaataaatactggttccactgcaagaggccaggcctcctaactgtcacctaagttcaggaggcctggttcagtcctatgctggttccccagttgtcaggctggggtccatgatttcccatttgctcaggtcaggtgtttctgtgggtttccccagcatggtcttgacccctttgctcatcactcctccatctctacaactggattccaggagttcagatcggtgcttagctctggatctctgcttgtgcttccatcagttcctagatgaaggctctaggatgtcatttaaggtagtattatcagggaagggcatttgaggtagcccctccactattgcttagattcttagttagggtcacttgtggatatctagacatttccctagtgccagatttctctttaaacctataatggctccctctattaaggtatctcttttcttgctctcctctatccatccctgactcaatcttcctaattcctcatgttctcctctccccttcccttcttccctcccctttgttctccctcccccttcccatgtgctaccaatttgttcaggagctctagtcactattcccttttctgggtgactatgtctctcttaggggcctctttgtttcttagcttctctggaggtatggattgtaggctggtattcctttgctctatgtctaatatccatatatgagtgagtatataccatgttcatctttctgtgactgggtaacctcactcagaatggtttcttttagttccatccatttccctgcgcatttcaagattgcattactattttccactccattgtgtaaatgtaccacattttctttatccattcttcggttgagggacatctaggttgcttccaggttctggctatttttttttaaatagtcattttcttaatattatcatatctttgtttgaatgatacataatctttatgcatgtgtttcagttgcattcatccaggattacatgatgtgagcatagaattacagtgcacatatatgtggttatattgaatctgatccaatgggtcccatgaaaaaaggttgacacagatccttaattcctagtaatttgctattggaagatttataagcaatagcatattttatctttaagggaatcagaactggtttagtccaagcttataactggggcagtgaggctctaaacatgcagcactacaatcaggttagtctccttttactaattgtaatgattccccccttttggaaagtttatgaaagttctaaagaaatgattattttttaaaagattgctgaacatttttatacttcccaaggtattagtagactgaggccaaagagcagctttaaaagattgaaaatacttctttttataacaatccacataaaaatatgtatatctacacattatccatagtaatagaaatgacttatctgtagaaatagaaaatagcttatctacagctatagaaaaaagtatttcaatagcttatcatctgaacttcacaacaaccttacaacctatcagatacttattgatatcatcatctcaactataaagaatgtaaaattcacaggatttctagttcgataaagttattatgatatttgattatactttaccagtagtccattcctgccttgacaaatgttgagaattcataaatgctgtgttttctgatgtatattatcactgaattgattcataggttagaatttaaatcttacagttcctactttgatacgttataaataaaaacatgctattcttcattttctcttagtctactcctccaatatacaacttggagaacatgaaggttcaaactgtcatatggagtggtgtaaaagatactttggcaaatcccacggatgttaaaaacttggcagctaaaaccaacaatgtagtttatcatgaaaagattgataactataatcatgtggattttataattggtaaagatattactgtaaaagtttacaaaaaataatttcatttatcaaaaaacatcaatcaaggtgaagttttttgcatgtatttttctgcttattttgaagagtactattctttttcttaatggaagcatttcttgatttcctctttctttttcaaaatctttgatgtagccctagctctcctggaccttgactgtagaccaggctggcctctaactcagagagtctcctgtgtctatctcctgagttctgggattaaaggcatgtgtgaccatacacaggcataatctttgatttttttaatccttgtataatttatataaattgtttacatatgaaaaagaaagtatgaattctaataaaatgtttaattcatcttgcaaacttttctaatttatgcatattaatttatatatcactgagcggtagactctgaatacagggctaaattttaactgaaataatattccacaatagtgatgcaggaagaggacacatgatgtgtctcttatggatgatgactataaaactgcctctcatattaatagcaatgtcttttactatttattataaaataaaactttgggataaacattaaagataaaacctgagacaattacaatcagccatgacacacaccatcaaagtccaattccctgctcaaaaaggccctgtaaccactttttgccatatcatcttcttctgaaggcctttccttctcttgtgctgtgtcttcaagggaactccatgacacattccagatagctgaatatgaacactgcctctcaaaccaaatgctctatttcattggatatcagaccacaacatagatgaaattcttataatattttccccttttgtctaataaaggaaaagttctaactctaacatagtaaaactatatacaataaaattattatcatgtgttgtccaaatagaaaaggtattaacattaacaaaaggacctatatacagcaataacaattatcaagttagaagtacatacacaatgtccagtcaatttgtttttggcaaatttgaaaagatattccatcatctgtcctcttcttaagagtccaaagtttcatatctactttattttctaacatgattatggaaaactgtaacagttaatatgtagtcttacacctcatcagagacttgagaagaacataatattacctgagcaaacaggaattgcagagcaagcaatttccaaaattataagaaatgaaagaaacagctggctgcttggatagtcaccctaggtttctatgtgatggtggggaatccaacttcagcctacagtccaagaatatatgacagatattttggagaggcaggaaattttgaaggactgtcccgcgctatgttctcgccggcaagaatcacacaggacactcggatcattctgcaggaaagctttaatgcatcttgagagaggagagcataagcttaccagagcggagaccccgagccaagaatcccgtcccctaataaaggctggcagcagccgcctgggatgtgtcaccctatgaatggcttcagctcctcaggccatatgagccacgggataggcagagatcaaagaaatggataattacccagcgcctgcgaaataatttacattcagtgcctgcaggcaccatcattgtaatggagaatgcagggacggctccctacaaaggacttcccatgttttggataaagtttggcaatcccttttctttgtgtcctgtttgtccaggttggacagcatactgtcaacagttgtagcaaggaagtttctttcccaaaaggccagcatttgctacaaaaaggaaactccaattttggaagttctctgatgcccttcagccatttttgaggtagattggtactaccagatacaaccatgtcttactgtcaaaaaaagacttatggtattaaatcataatatatgccatattctgtaggtctttgaagtgtttgaagattacctatctatctaaaatatatcactgtgtgaccttgaaaacacagctaacgtgagactataagtttgatgtttaaggatgactattaacctgtatttctttattatcctacatagcttttaaggactaaaactttatgttacataactaaatgagctgcataggtacaatatcttaaacaaaaatagaaacatatgttcagtataataaaataaccttgaatgggtaccaacatacaaaatatcttaaataagactagaaacataaactttaaatttgtatacatataccaaaatccatattaatgtaaaattgtttaagattaatagttgctctaaaattaaagtagattcagtagtctacccttttccctatcattcctatattccatctttttttcttttcagaaaatggatcactgaatctacctttgaataggattttcttgaacacatccagtaactattttaaccaattccgctaaacaatgacaaatatctacaaatccactgaatgaccaaaatcatctgccccacctcttgggaatgtgggcatcatgtgttttagactttttcctcccaatatggggtgctggcatgtttacaggaccctgagaaaatagagattatgatcaagtcctaagggaatccacctgttatccagtcttggtatgatgagaaaatgcaagtctatctgaagtcctggctggagtagtctaagaggctggaccatattaaataactgtcttgaaattgtttggagcagtttgtagtccaaagctgatcttggatggcattttacagattagtggtgttaccacaatcccaatgtgatcatcattgtgagacatcatcatcttttggagacttcaaaggtgactgatagtattgttcatcattcactgtagaaaatggaaacattttaactgtcatatgcagcagatttaggaacagttaaatgaccataacctattaaacatacccaggatacataatcttaattcctaaatacttgctttagactcaagcctaaaatcacacactggaagttacatgaagcctaaagttagaattacttagtacttatgtgaccattaatatcaagacagaaaatttaaatttgagataatagttattaataaaagctttaaagacaaaataaatcctagggacataacattaatgacaatataatagtccatagattttgcttttcttctgtctcataccaggtggctcttctgacataagacagagattttggattttattttaacaaacatggttggctttagagaaggggacagccatgctccaactccaaaaccagctttagtttttaattgagttgggactatataaagtccaactgcctaacatgtctgtagagaacaggaaaacagtttgaaagattcatgaaattttatcctgttggaagtgtgctatgccattaggtcaacttccttctttcctggggacattctttcacccttctttttcagatgcttcatatgtccaaatcttcagattccttcagatgcttttaatctcttggaaagaacaaaagaaaaccaggcccagccttaattttggtgaattttcctttttgcctgtttgaattgccatgctgctttatgaactattgcctttcctaatcaagaggtctctcatgtttgaattgaatatttataatttgatcgtatccagagctttttctcccatagaaacagaagcaaaatctctttccctatgtgacacataccctggttaccattctgaggacaacacatctgtaaaatatacagggagatttagtttaacagttttgttttttctattatccagtgtctctccaaagttggtgttcccttttcattagcatttataaattttaaggttaataaagcaggatgcatttgatctctagtgatcattagtacccccttcaattgattaaccatttcttttaaagtgatattagatatttctataacttattgttctttaagattgtgtggtatacctgtaatatgatttatcctataatatgtttaaaataaatgttgtattttactaaagattttaatttgtacaggtattcccataatgtccaaaatccctaataagaatattactggtatacctcatcattctgtagggcaagcagttatagaaagatctaaatgaactctaaaaatatgctaaataaacagaaaggggtaataaagaccgctagaaatagatttttttaacctaatgttagacccaatctttctatcaaacatgtgtagctcttactcattgtgataacttgactatatctgcaacgaactacaatccagaaatggagggcacacttgtaatctgggtcttgaggcaagatgacaacatgccttgaatccagaccaccagaggggaagccaaaagttttttaatcagatatggaggctggaaggcacagccctaatctgggccacaccttctgctggaagcccatataaggacaatgaaagaagaaagagttagttctttgcctgcttgccctcaccttgtcaatagattaattccttcactggagtagagcctacttcattgggattccaacatatacagaagaccagctgggatactcagcctcctgagactgagcagctactagattcttggactttccattcaaagacagacagatagatagatagatagatagatagatagataggatagatagataaatatagctagattcatattccttccataagttctgtgactctagaaaatcctgactaatacattcatcttttgttttagaaatagctcacaaaaatatatgtagaaatatataatatatatatatatatatatatgattctaaattgcaagttacatctttgtcaaatgagtcattctatatgaagtctaatataaaataattgcttttattttattttctattgattctttggtaatttcacatcatgtaccctaatctcacctatcacccagtgctccacatccaccctccacccttgtaatgtccccaaaaggaaaactatgaaagaaattttgaaaataagttaaatataaaaagaagaaaaatattaacacaaacaatacagtaaaaacaaaaacacaaatacaaataacaatatcaacttcaataaaaaaaaacaaaaaagtaggcacacaaagcaacaacaaaaaagtccactttgctcctccatctttgccactccattgtcttttcattattcttagcaacattaggagctgctgtgtattgtgcattacagtgttctgtgcaagctgctattcttgcaaatgttccttgtgtaatgtgttgttagtcaggttcaaggactctggctctctgcacaccatcaatcctggactccaatggaaactctacatatatcccactgttgcccagactcatgcagatcatgtagcaatagctctgcagtgatgggggaatacttctgtgtatgtttatcttattgattgtttaataaagttctgtttgaccaatgaaaagcaagttagacaggactaggagtcaaagaggattctgggaaatgtagtagagtagtggtgatccaggctggaagtgacatagcaaggagattcatttttagcaaagagaaagaggaaggcccctgtcccctggctcctccagctgcgccatgtgagccacaggcaagagagggcaccaacgaaaggcatcctctataagataagtcttataaaatatatagatttatgatagttaagactgagctaacagatgagaatcctagtcattggccaagcagctttgaacctaatacaagtctctctgtgcattaatttgggccctaactcgggtgggcatatggcataaagcacacacgtggtggtggggttcgggcgacgttagctgaaagatttatcataacattgcaggaacagtcctttcattcactccagtaggtaatagatggggtattataggagaaactatggtcagcctgccaaagccacagatcctctgccctcggtgcccaggcctgcttgcatgaacatgtgcattctaggcaggcatttcctccctgagccaagccatcaagcctgactcaatacccagatactactgacagtgagacacctgacccagagacaccaatgaggaaaagacaatgcagcagagtcagccacctgagccaataggaccttgggagggggtataaaggcaggtctaactaccttaataaaggagtctgcagcacgctctgctactcactgactctcagtgcctaagttgttggtgctatgtactttcaccccttcccccaaggggtgtcctagcaaggtaacctgcaaaagggcctatgtttgggtgttccaaatcaaagctatggatatgtacctgggtgtctgctgagttgctcagccctggcctcttggatcacacccttcaggtgattggcagaaaaagctttcctaggatcatgatgacaggtaaagacatctttctcaagtgtgagaggccaaaacagttctaaacaaaaataacatgccaggaagtattatcatacttaatttcaaactatagcacataaatatagtagtaaaacagcaaagtactgacacaaaagcagatacattaatcaatggaataggattggaaacccagctataagtccacacaacttcagttgtcttgatttctgacaaaggtgccaaaaaaatacacacagaacaaacaaagatttcagcaaatggtgcttagaaaactggattttgtcaggtaaaaagataaaattagattcttatctctaactgtacagagaagtaaactccaactggatcaatgaccccaacatgagaccttatatcttgaaaccagtagaaggggagaaaaaggcttcaacttatatacacaggtaaggatgttctgaaaaagattctagcatcacaggaaacaagacaagaatgggaaatgacattcaagtggaggcaagtgtttgtacaagtttgtagagatattatacacttacagcaattatgttacacaataaaggctgttgatgccagaaagtgaaaggaactgagattataaaggaagatatgaactgtgagatacaattaggcacaatatcatgtaatataggtttactttttgaatttaatattaaagtaagtacacataataatcactatataatataaaagtctgaatatactatctattgtttaaaataaaatattttatgagtcacttaaaacacacttctattttgtatgcagccatatgttgttttgactacattattctttattttaactgtgagaaattgctttatattaagcagtttggtaaaatctcatcatcctccttttttttctagtatccaaatacagaatttctatgtgttacaagaaaagcagaattatctagtttataattttggatatttaagaatatggcaaagatgttttctcagcactgttgagggcatcgttacaatggtggaatagaaactgaagacatcatttggagaaacgggaagcaagagcatgcaggtacaattacctgaaacatctgtaacaacagttttaacaccatctaacaacctcttttggaatcagacacacagtggtgccctgacataacatacacctaaaaaaaattaaaaacaggtaacagagtcagaaatagactctggttctactgttaggagttgtacaagaggaccaaaccacacaattgtaacataggttcagaggacctaggtcagtcccatgcaagttttcttgttggcagttcatgctctgggagacactatgagcccaagttagtgccttctgtgtgttttcttgtgctgttttttttttttttggaaaattcctgtgccatgtagtaatcaaaacagtaaatttacaggacaagaaagaatattaaaaactgaaaaggaaaaggtcaagtaaaacataaaggctataaaagaccatggatgccagcccttactattatacccagcaaaattttcaagcaccatagatggagaaaacaagatatttcacagcaatgttaaatttagataatatatatccacaaatatctatctatctatctatctatctatctatctatctatctatctatccaaaaatccaaccctacagaaggtattagaagaaaaaccaagaaggttaactacatccacaaaaaacacgagcaataaataatcccacaccagcaaaacctaaagaagggacacacacacacacacacacacacacacacacacacacacacacacactactactactactaccaccaccaccaccaaaataacaagaattcacaatcatttgtcattgatatctctcaatatcagtgtattcaattccccaataaaaagaaacaggccaacagaatggatatgaaaacatgatctagccttctttctactgtatacaagaaatatacctcaacaccaagggtagacattatatcagagtgaagggttggaaaagattttctatgcaaatagacatagaaagcaagctggtatctctaatctaatatctagcaaaatagacttccaaccaatttagtcaaaagagatggaggacatttcatactcatcaaaggaaaaattcaccaagaggacattgcaatttataacatctatgccacaagtgaaagggtacccaacccacatttgtaaaagaaagattactaaagcttacattacatgtcaaacaccacatattaattgtggaagacttcaatatcttgccttcaccaatggataggtccagacaaaaactaagcagacattatgattcaaatgacctaatagaaatctgcagaacatttcacccaaatgaaaaagaataaaaagaatataccttcctcttagcacttcatggaaccttctccaaagttgaccacatacttgctcacaaagtctcaagagatacaagaaaattgaaataaccccctgtcttttatcagattaccatggattaaagctggatgtcaaaacaacagaaacaatagaaagcttacaaactcaaggaaactgaacaactttctactgagtcaccactgggtcaagggagaaataaagaaagaaattaaagacttcccagaatgaatgaaaatgaacatacccaaacttatgggacacaatgaacccctgaggagttaactacatgacacggagacttcttttctggccatctccattctggaagagtgtctgctatgttttctttgaatagtctccattccagcttcctcttctacaccacacctctatggctttggtctctacaatgtgtcacagatgtcctcagtgttgtcactgttctcaatttttctctattgctgtttaaatgtaataaactctcagcattgtctccaaatgcttttttgtcttctacattatataatacgttggtaatgctttccactgggttttatcatttgattttctcagttgttcattttcaacattggccatttttgctcccccccccagaatctctgtctcattgctgaacgtcctgtccaagttccagagttttccatccaagtcttcaagtgacttatttactttgtgcatttatgtatttaagtcctctttgaggccactgagcatgttttgagcaaggttcaattgttttttaaaactaggttggatttttatacaacatttcaacagagttcaggacctttggattaagttaatgagatgttattatcctttctagagtcatattgcctggattactcatgttcctttgatggaatctgtacatctttcgagatgactgtctgacttatatccgggtcttcccagtgagcagacttctcttgaggtctccattgcagtaccactcagagaacagactacagatcaccataaccacaacacaaaaacaaaccacatatagaaatgtaataaaagtcaattacaagtaacagaaaaggccaacaaccaacaaccactgaaaggaaaggggcaagatgatatagcataaattacaaaattaaaattaatgaatgtaaagatgataataacacaagaattaaagtatggaggattgtgggaaatgggggaaaaaagagaaatcaggttaaagtaaagacaaaagaaaacagcacaaagaagtgaaataaagagactacaatttgattacaaaataaaaatgcttaagcaaattatataagggaaagagaaatacaaatgaaaaatgtaaaaataaaaaaaaataaaataaaactgggcctgttacttaggaaaatgaggcaagaatgatcataaatacaaggcttgcctggactatggagtgagtcaagggccagcctgggcaaatttgtgataacctgtctccaaacaaaaaatgcaaacaaagttgagaaaaagccccagcgctgtaggccttacccagtctttaccaggccctaggctcagttctcacaaataaaaggtagacacacataaaaacaataaaaggaaaaaaaggagattgttaagctctgtttcacttgctccaatactggtttctctgtcttcccactctgtgtaggtcgttgtgtgttgactgatggtaggttggccggggctgtgttgtcaacaacaagcctccaattacctcacttgcttctcttcgtgtactgaaaccccttgcggaccccaatgaactctgtggcctgtgggcccgggcaggttcctatcacttcagagacacctgctcctccagtctcacaccagggacagccatggtccatgcagagaggtgtgcatgagaacacagaaaagtgggagcagcggagagccgagcttattctggaggagaggtgcagaactgaaggaacagtgtgtctcccgggctcggctttctcccacgctgcacaacaggaaactaccaagtgggcttcatagggttcactaaggaagctaagatgtggggtaaattagagtaactgctcccctgcagataaaaatacaaccgctaagtccacctcgccctctagtggtgaaacgaataccctgttattcctgagacttccctcttaaaatgtttggtaatccaaggccaagtggtcagccttgatatcatacacatcccagcaacgttatatgtgccaaacaggttatatatataaatatgtttatgaacatatatttataaatatgtatctatttataatatattctaatatatattagagattgtgtgtgtgtaaaacacagaattagaggccatcaatttgagagagaacaagggagggctaccgaggaaaggatcgagggcgaaaaaagaaagaggaaatcaatctaattatattttaatttcaaaaattaaaaaatcaaaaaagttatgggaagggagaatgctattttaagtaactatttttgcaataataatattacttacatttccatatctacccacttatggaattagcattattatagttattttgtttctagaagcaaatttctgttagactttcagtaattctgatttacccacaaattattttcctttttaatggcatacatttctagacctgtctgtgatttgaaatatgtggtcactgagacattaaattttatctacaaaagttcttaatacatgaagaaacgaattgtgccgcagtagatgtaaaaataaaatagttggttgtgaagcaaattaagcatacagcatcatcaaggttaaagtttacacaaagtagacaatttgcacctcaggaactatttagcagtgtctggagacatacttgttacagtgacttggagtgtgtgagtgctactggcatctagtaggtagagtccagacaaggttagcaataccctggacagggaatgtgtgtgggaggggaacttggaggagtggatggggagaaagctgtagtagggatgtatccactgagagaagaaacataaatttaaaaatatatatgcatagatcttgcttggattctcttttaaacagctccacacttgtgagatgctgaggcatttgagctgattggatatgtaactttaaggacgtttttgacatgataatggtatcattatgtggataagagaagttatcatttcaaagttgatcctgcgggaggagggaagtggccgaagccacaggtggaacaggaatgacagagaaagtggaaataacaaagaatacagataagttcatcaaactatactaatactaaatagatttaatcttctatacccttaaggggaaaatgaggttcaaagctgactccaaagacgcattccagtgtagccggaaacacttcatttgcttgacttttgttgattcagagaagtgagaatggtgtctgtgaacttggcactgttgagctttatatgatgagatgttatccaggggatgggcaaaggaatcccatgtgagtagcctccccccaacactggggatatgcccacacttcagagtagcaatggagagagtgtaagtgagatgctgtggaagcaaatacagtgacctttacctcagttcggagaacaagatccacactgccctcatctgttagacatgggctaaaataaggcaatcagggttggaaatgccagaaacttaagaatgcaatagttatgctttctcaggatggtatagagaacatgtttggttcttaactgatggaaccaccacaagtatttatcactaattattcactgaaattttaaaggctcttaagtgatcccctcttaaaaatatctctcctgataagaatgaaggagaaatggacaatacataagaaatccttaagagtcctagcaaaaggcatggggcaggaaaacacaacgaaaaggaacatttttgtgaaggctctctgtcttttactcattacccaggcaacaaacaaaccttacttaatatatctcatctatttgaccatactctggacaaaaagtagaaatcaaaagcattagttacatagaacctgaagccacattgaaaatgggagtgtgataataaaactcatatgttagggatgttttgggtgttttccaaatttggagcttttttattttttaccaacctgtggcagatgtctattttggttcatatgctacaaggaatgtctctacatcttcttgtagttaccaggacattgccagggacttttaaaatagttttgctgggtggtgactgttttgtggttgaggtcttgagtaatgaagggcacactgtgcatctccgagattcctgagtttgcatccgaattgtttctggattcctcaaccgtactcagtacagtaggatttctcatgagtctcacagagaggagtacatgatatttttcagcatgtggacacagcagtggtcatgaatggtggtttggagcagttttatcatgataagacacatgagaaaagtcgtcattcagtttcaggattctgaatgaaccatggctccccggaatctaaactgagtttagaaaagaagtttgcaaaatttcaccctgtcccagaaatgtactttcttaggtgtttctaatccaagctcccaaatgaaatgttgtatttctttaaataaattaaaaaaacaaaatgacaaatgagaactttgttgatgccaatatatttctaaagtcaaaattacagtgatacgttttctttttaaacactgggaaactgtgtgaaagaagaaaggattttggaatacacgtaactaattcttttgatcttttgccatcatggaaacgatctcattgtaaacctcttgaggagcattcatggccctgagaaagtccagatgcttgtaacggggaacctccttatggtaaatgaggttttggagtttgggaagcagcatgctaacatctcggggatcagccgtgatgtcgtggccaccattccacactgcaattggcacagtcatagctgacacgtcataatcaggaggtgtgctctaaaacatgacaggtaaaagacgtggagtttaggcaaccataattcagaaccagtatgaattgtgtattagttccaaataaaatctaatgatctattcaaggaaatcacctttacccacagagcaaaacaaacatcatagtttggacaaatgcttctcaacttctaataggtctgtcaatctgctaggactgttgtttaaatgaagactgactcagcacatctgggagcaaagtcagagatctcacactcaggggatgttgatgctgttggttctaaactaagaactaaatggttggtctgtttatgagaattcataccaattaaaaacctagattttagttcagctgaagaaagaggatttaactagattcttgggtttgtgtgtgtgatgggtacatgcaaaccactgtgcacatgtgcaagttagagtacagccttcatattggtccttggcatccatcagacagggtctctcccatccactgatgcatatgccaagccagctggccaacaagcttttggtaattctcctgtttctgcctccctcctaatagggaaacactgagttattatagactaggcttacatagaaaacactgcacattgatctaatcacatcagcaaggatttgactagatcatgactttggcagattgcctccaccactctgaaacatgatctcaaacagtcctggatactgagtcatttgttttgactttgtattgccttctacagtatacattatattggcatatttttatatgctatctgacctcattagaagctgctctccttggcaatctgtcaattaggaacctcagcatgactctttcagtagtagagcttccctcagtcatttctgctagatgttgtaagtgcctgaattaatgatggttttctgctgctccctactcattctttcactcctcagcctcatctgaggggatgctttactctcctaaggactcttgatacagagctccatctggtactttaacaggatgtctcccactatttcctgctggttgtttcttaactgcaatttaatggtgttatattttgtttggcttctcaatcagcctgatccaggggtatctgctggatgtttttagtatcttatttaatgatgtttttctattgctctgttgattctttttatgtgcatctcactatctgcttgtaatatagttaatatactcactttctcaaagctgaaggcatggttattataaaccactctttggcctgtacaaaagaactgcctgtatcatggcgtgaacagtggttcagtaataagctgtatcttctgcacactcatataattttactaaatattgcttcaattcctgagaaaaagcattattgacctggctttttatttctagaaaaccactattaacacaatgagtttataaagatttacaaaacaaaaagtagtacaagataggcatttccacgattcccatatccacacacactctacttaggtacttttgttttttagatattatttcaggatataaatccaatatccccaaagtttgtgtcttcacactttgtgaacaaaccaacttacatgtgcaaaacatttattacattattgttacagtaatttatgccttttcttacattccctcacatgttggctaaaatgtggagaatatctataatacactttgttttgcttacacactattgaggaaacaccttcctagatgtcatctctgctactaaattaacatcactgatttcaatgacaattaaatagatgtgtgattggctggaagaagggtagacttgatgattggttctcaggttcttgcttggctatctatgattgaatactttggttcccagaatgagagtgaaataacactgtaaattcaaagcaagtctgaactttttgaattgatctgagagtattctgaaaaaatcttttaaagacatcagataagtaacagggtggggcttctctttatctgtagaatcttgttatgaaaacatacacttttcagttgtgagtcagggcagttaatgaaaattaaggttattcagctacaacttgtggagaaaattgggttgtttaaataggaagagtggctcacaaactatttgccttgctcaaaattagtcaatgataatcagagattttgccctgagcaaagggttatatcctactaataatttcgtactctgtgaattattgtgcaaatttgtattggccaccaattagatcaactccaggatttgggtcctttgtaccacagcaagtatgaagattacaaggcaccttcatgctcaaaattatttccaactctgacctgaaaacacaccacctttttttttttctagttggaaatgtgttccataaaatcatttgtctggctgtccagaaggcgaggctaatgcatgagtaaaccagctagactcataaatggacataattgttaacttgctttatccagttccacttcagaaagaagagcgtattgtggggaggctgaactataaagcagggctgtgcaaggaccacgagctgttaatttatggaacatcttcacatgtgatctggcaagactctgaggtccatttccagagtagagtagtgggataacaagaaactggacaacaacattactttgaaaaatggatacccaattatcatactttcctttccaaacttttatgtctctgtcttttaaattgcaaacaatttcattctcaagaaacttacctgattgtagtgtaactgattctggaatgggcttccccaattaaaggcttgaagtctcccagctctagcaacctaaagaaaatgtaaatgtaaaaattaagttaaaaattagttacaagtaattgaaattaattggataaaacttataaaccacctgaaaacaattcagcctccaaatacctcattttcattttttttaaaattagtgagaaaatattttctcattccaaataattactaaccatctaggatatgtgggttcaatatataacatatgtgagtgcaaatgcagctttgttccaacttcttttttgcatggcaaatcataaacataattatttctttgctactcaaagcacatgttttcataagattttcatgcacacaggttaagaggtttttgtttttttttttttttttcaggttgacgtacatagaagaattgcctgtcaggaacatcttaagaatgtgcttggggttaaggttcaatcccacaaaatgaatgctagcaacactgaaataatgatacctgggcccagtggaggatgttttgaacagatgttcctgctggattatcacctgggtactcatcaaaaggactctaggaatcaaacacacacacatacacataggcttagacatacttggtttctgaaaaacagtcagtagctaagttttctggttcaagcaagtgttgcagggtaacctctaacggaaggatgaacaatacagttgcatgacagcttagaatctacaaagcacaccacttgttttaaccatgatgagcaaggtagctgatttaccagctctatatttttttcaaagcagattttgagacccaaagaaataaatatcaggttcacatgaatagtgaccatcagtatgaggctagaaagttttacctagtttctgaacctaaattctcaactttctatttagttatcagtgtgcaagaggttaaatattatatacaggttgcttgcttttcatgattttaatttatattaaataattatacatatatacacacatatgtatataagagttaccatatatatttacttatagtattctatctagtccttaagtcacattgctcagacctgttagcattctcaagtccagattgcatgggccaattcaatagtgggtcttagactgtggagtaagataaccatcaccaaagagactgagacctccctttatataagcagcatgcagaagacaagagctctatttttgtttcttttccatatctctagtttgctattatctttctctgaaaactcttatagatatgataaaagaatcaatctgtgtttttgtggagtaagcccaggattctcttttacattcctcatacataaagagaaacagcctcaaattgaaaagagcaagaaggggcccttaccaccgtaagtaaaacctaaaggaaaattataaacaaatgtgaatgtatttatcatcagcactgagaaagacaactaaaactccttagtctccatggaggtagtagctttgttttcactactgtgttcccaatgagtacagatattagtatgttacatctgatagtagccgtgttttaactactatgctctcaattatgcagaaattagtaagctatgtctttaacttaaaattcattttttaggagttcaaagatataaattagagtcaagatcaccccgtaattccagctacttgagaggctgaatcaagaggatatagccctacattggctatagaatgagtgactcggaaatttagcaagatgctgtctcacaaaaaatgttatttaaaaatactgaaaatatatctcataagtatagcatggtcttaaaattcctaaggtctatgcttaataacacaaaacaaaaccacaaaaacaaaacgaatgatcagccagcagaagtgtgtgtatgtataatagtaatagtaatatgtatactatgatcattgttatgtgctttatgctatgttctgttctgtttgtattaaataccttaggtgatttgaactttacaatagcatggtgtgtgtgtgtgtgtgtgtgtgtgtgtgtgtgtgtgtgtgtgtaaaccactacaggagtttaagtcagttccaaaagtagaatttaaattaggctgacttgaatccatatgtttaaggccctcatgatattggaatttctcatataagccttgaaactccaactccaggggtaaaaatgcagagcaagatatggataacctgtttcatagctacaccgaaatgtgttttacaaatgaatggctatgactagcagtattaaaagacttcatggcatttacttgatgactatacattgttcctcagaagagcctggcattaaggttcattcccttctgtcacagaagctaaatgccacgctagccaaaagtcagccatgttttgaatgggaacaagagctgaaattggaatgagcagtagcttgtgacttctctggactctaccacaatgctgtgggcacagttctgaggtgatgatgaaaaaacaatcaaaagtgtttgggaagagtgtcttgaataatggaggccacaaagcatacataccacattcaagttctttctgtcaaacccacacataatgaataaagcgttgctgcagagacgatccatcagctcccgagaacacacttctgtaccgggaattcgatcaaagaaggtgtgtggcatgaacattttgtcaccaaatataatctgaaaaatgagagcatcattagaacatggcagcctccaagctgtagaaagccctcttcattgctgcaaacactcattcaggtagtgattatgcttgtttttctttaattctctaagtagttttagaaatttcctctcctttagaccagtatttctcattatgcacaaaaacccaactccaaacagataaaagacctaagtgtgaaaccccaaacagctaagcttctagaagaaagcattgtcagtaccataaatgatatagaaatagtaaaggacattctgaatgagactctcttagcctaagaattaaggctaacagttgacaagtgggacctcataaaaccaaaaagctgcacagcacaggaaacaaccaattagtcaaagaggagggccacacaatgggaaataatctttgctagttatacctctggcagagggttaatatccagaatatataaaagacaaccaaaccaaaccaaaaagaaacccattcaaaaaaaattgacccagaacatgagtagagagttcgtaaaaataaacaaacaacacatagtggctaagaaatatcacagaaagttaattgtctctaacaattaggttaatgaaaatcaaaacaactataagattttatcttatccctgtcagagtggcaaaggtcaacaagcaacacataataataataattattgtcagtagaatgcagggaaagggagctctacacttcctgttgagggcattagaaacttgtgcagccacttggaaatcagtgtggagaattctcaacaaactaaaactaaatctacctatctatatcactcattggcatatgcacacaggactccatgtcatacttctcagatgctattataatacatgaattttgtggaaatatacagacatatatatagtttaaatgaaaatttctcatctggactgataacactctctccaagagccaaagaccatctaatgaaaaccgtaacactatgcatgagaaaccctcatttgattggttgaagttgttgatcagggttgtccaagagacttccaaaacagtacagactattgctattgtccttgttcgctcccaggatgtaaacgacaagactcaactgttgaagacatgaagcaattcacatataggaccagaagcccatgggctgaaactaacaggaatggctcctccctaagaaccgggagcaactaatagttctaatcagctatgactcctacgaaccacatcaatgagcagtatggcaagataaccctaaggttgcatggtcacacatgtactttgattgcaaccaacaactttctaattggaattcctcaataagaggaattcatgcagatatagaaaacctatctaactccccagagataggaaagtcatggacttcggataatctacaaccacaactttactaaaccagcataaccccaaactacattctaaaattttgtctttatgtccacaaataagtgtagttctgaccccttgtaaaggaaatttctcgttgcaacaggcaagagaccattatagaaaaccacaatcagtcaaactgcagacttgtggagccaaatcccaactgatgcatgtacaaaacaccccacacctaaggtttagagagcattgtgtaagagggatggaaagactgtaagagccaaattgacagtgagtttgctgtgatactgtgtgcctttgtaatgccagaatctacatccacaaaatctcaccaacatgattgcctaaacatgagctgaacaaggatgacaacacttgacaggtgtggacatgaggaatgaccatgaggcctcaatctgacacaaggaactataggcattaagagaaactgagaactggagtgggaactggagtgcttttccagggaagcagaaaccaattgtttatccaataccaaatggtcaatcctgaaaatatatacacaagtttcactatacagaatcaggaggctatattcataatatatgtatctatgcatgtagcaacggttaatgaataaagaggctatgaatttgaaagatatcaaggaaggatacatgggagtgtttggagggagcagaggggaaatgttattacaatatcaaatattaaataaaatattcattatgtgtatagaggcatgtgcggtacatgtgtgtcacaggaagtgtgtggagattagagagaaaactgtaggagttcattgctctctcctcccactaagtgtgcctcagtaattgaatttaggttgtcagacttggcaatcagctgtatccattgagctatttcccacccctctttctctcatttaattctctcaatgaaattgtgaaatggaaagtgcagatacaacattcggtgtgtattattgcaattgagaactgcatagcctcttggagcaatataagacacaaagaattataatccagctggagtaataaaagctatggaatcaaaccatgaaataataagacagattgtcataattacatatcaacatgtgttatctgagtaataaattatgagatcggaggagaaaatagggactcagatatctttaggaaaaatttttagactcaattgtgttgagctttgagacattttgctttcttaattttatacccaagaaaacatggctagggaatagtgtttcagtaattagtaatgaagttattcctgtaattctgatccatgcctgtgatttaatgtccacacaccttctcctttcaatttttctgctcttgctaactgattatctgagcacaagtggaaacaagaggctcagtgcagcaggaaatggccacagtcattttactctcacaggttttgcggaaaagttttgttaataattttggctataggcagtgattttgggtttaggtatgcatgctaatttagagtgaaagtgaatgaacaatatactgaagggaaagatacaattactgtaaagtatttacagcctcaggctaaatcattcttctaaaggaaattgtgcaaatgtgcaggtgtgcctgcatgtgttggcatgagtacaggaaaagtaggccattaaacatttgactaagtgctattattacattcctgtgtgggcttgttcaacaaggcactaaatattcatggtctattcatgtctatattactgtcctgtgaaatttccatttcttgggacaagaactcatagacagcccaagagcatttacttggaggttgcacagtatttactttttgctcattcattgatttctttgctttatttttcccctccccttcctcttccttcttttcctcctcttgcaagtttctatagccctactaggattcttatttgattattttttttctagtcgtttattaccccattctctattgcaggagtgaagctgctaccttgacacaggtgtgtagaatatttgtagaaagcaaaacactcatagcattgacaacccactgtaagttaatgaaaaccaaaggaatagatggggatttcagaggcaagagggtcgataattttcatgccagagagagataatataaacatgcaaactttaggtttgttgatatgaatatgttcatccctaagaacatttatttattttgatcactttggaatccaaaggcaattggatacctaaaatagatcacatacctttaaaagatacccaggaatacgtgaaagttttttcaaagggctttgtgcatatgtgagagtagcaactggagctaatgcataaaacgtcttgattctattagccagtgtgggattggtagaaaaggcaataaaacctgaaatagaacagaccatcagtgatgagctgtgtgcatgtgtgctgttctgttttcacaagtgtgatgttattttggacttgctgcaaatgccgtgtgaggcaagctgtcaaaatggcacattagtttgttgggatatgtatgagcacagtgatggctctttaaaatagccactaaagaacaagaagagttgagttcagtcttcagttaactcaagatagaggcagagtcgagtaattcagtgtcaagacaagcagttttactcatctcaataccattcaataattttataacatgttagtgagaaaacactaagttagatgaagtgtgtgtcacagaacgttaatgttgtaaaagctcctgatagccaaacacagttcttgtcagatgctgctaatctcagcactctggtggctgagtcaagaaggtcaggagtttgaagttagcttgagctacacaggacagccttgtttcaaaaagccaccatctgcaacaacaaagatgcctatgacttctaggaaggtaattctaacaactccctttcagacatcatttcacatagttttttgataagtaggaaacctgccctccctttggattccagaattctggctgcttgcatatcattatcactacctctaacgttgtttcctttgtcacagaactctcctcttgaaaatgaagggataactctgttgtgctgagacctattctctcggctgtctgaattgattctttgggattttaacttagtctcatggactgatgcctcctgtggagtgtttttagtccagtgttctttctttaacttcagatagtttattactaatccttgacatctttacccaaatctttaatagatgacatagagtgttcccaaactgagttcctgatgtccttatatatcagctttctcacagacttccttccatatgactcttctatgtcattacatgactcttctgtgtctactcagagagtgtttgcagaattttttctgttgaaaatgaattcagaagccctctgagaatcgctaaaatcctccatgagttataatttcccataacattaccatggtttgttgaactccatttacttttaatgttacttttctgtccccctccatataagtaatataaaggtacagactttaacttatcttctttggtatattatttggacaaataatttggtttccataaaaatgatgaaagaaaaaaaaaaacaatttcagcctggatgctggaacatgctgccgtgagagtcagttgacctggactggtatctgaaccataactttggactattcatagaggctcatgctacttgcctgagttatttatctcactgcttcatttatccatctctagggtatgaggattaattgtcctcatgttactgtattgccatggacatgacattttataaagttgcatagcaatggttatgctactgggcagtggtacagaaactgtacccagtcagtgcttttacttaccaatagtggtgccctgagaatgaccaacatagtgcaacttctcttgtccagttttctgtacaatgaagtcgattgtggctggaaggtcatatttagccatttcatcaaagctgtaagaaaaagtaaaaccaacaaaacatattttcttgttatgctttctaaaattcaagcatatttattgaggaaactctatttcttctaaaaagcagaaaaattagacactttaattattgccagttaaaaacctgtagtcagcgtcagatgcctttgaggggatggaggttgcttgtaagcaaaggccatatttttcaaacagtgcataatggttacaatctaatctaatgaagataatatcaatgggtgggaattattttcatacataaagtggaataccagaattaacaagcacttgtagtttactttatgattccatttaacttgagtcccatcctgtagtacattcttcttaaatcagctattacaaaagaaaaatgagaaaactcttgaattgaacaattttagtggcttctctttgtgaacagaatgaatttcaacaccctctgtagatccggttcgcgtcaacattaatagtgttctcttgtgacactgtctctctcttccccactacaccagatggtacacatgggcttcctatcagttctcaaaaccataaaatcatccttgtacctcagcagcatcagccagatgctcttctgccatgcatctccattagtcatttttaactgggacacaagaaggaattgggtgcctttgataacgttcctgtgtccaaacttggggcttttcatgccgatgcaagttgctgtcccttccttccagttctgacacatccctaggcttttggtttctccccatggagctttctagcaacagggagtttgccttgcatcctcccttttgctgtattgttaattttatttggaaaagaatttttaggcatctcttgattttgggtctagagatgatagcaaatttgaaggaaaactccccttggaatgaggtgtatagaagattcaaatgttgaattaaaacgatatggctttttttttttttttacctcctacctggagtgtaattggctctaatgaaaaagtgagaatgcccatgcttgtagagttcaagtacgtactcattttaaattatcctttctttacctgaaagcccagaattcaactgagttgggtgaataatataaatttctcctggaccatggattcccgcggctgtttcccagccacacatcataaccagcgtctgccaaaatgaagggcaggctgttgtttgacagattttccatccagtttgtggctgatgtaagccaaccatgctgcaaaaacaccacaggtctcttgcctaaggaaaaagattattcaaacattataaagttattccttatggtagttagacatgtggtcaaattgagtatgtttattttgttatgtttgtatttgacatctaaaatatcttttctggagtgtgtctggtatgccaaaattaatcaaattgtacactttgttcatttatttattatttttatgcatttgtgtaagcctgtatgaatttatgtgtgccacatgttttcagaagcctccagtggccagaagatagcatccaatctcctagaactagaattatgtatagttgtgagcagccagcttgtgcgtactgagaattgaacccaggcctaagcaagagaaactagggttcttaaccactgagactctggcacataaattttatttttatttagtgtatttggatttatcaacacaggaccttgcatatgctatgcaaatgtacagttgaactatatcctcatcttatattgtgtacatgaaatgtatttactcttacatgtcagttaaatgtaaataaagatattaaaatgataatctaaggaaattaagcactgagtaaatgtaggttaagagtagtaaagttatgtttcattatttttctataatgagagaaagatgaaaatctaacaatgttatcaaaataaaatggcctttgtctatttaggaaatagacctctagctacttccagccttccctctacaatacaaactggctaactctttccatgcactggatttcagctactgtgttgaaagaaattgtccctgatttctttaaattggttagaggcctttgatagtccttttttaaaatcatgattactttctcattcctttgtctcagtagacttcattgctgcttattgaagattggaaatacaactttgcattgcatacagagtaaactagactcatttcattgttagaaagaaatgaagggaaaaacaaagaaaagtgtggggacagatggagagatggatgaagggaagggaaaaaggcaaggaagaaaagaagcaatgaggaaaaggaaggaagtttatacctgaattctctgaatgtgttttcccatgaggaattctgaagacccccagaatgtagccatctccagtcataacttgatattcttcacttggatatcccatgaaatttatcatcagattctggggaagaaattttaaaaacaaattttttatgttttaattaatttaaaatgcatctaacaagtatttctagtgaattttaaatttttaactaaaagtttagacccataatggctctcatcccagtaatctcccttaataactcacaatattcatcattgcttcaaggatctcgggactcagtctttcatttaaaccatgtgcgcctccaaaagcagatatcacacttgttactgtcaacagcagccacatcttggactgccctgaaacaaaaggagaagctatattatggttaacctacatgcttccataacattcagagtttgtgactgttttacctccaagagtattgtgggattggctgagtttgactatattctgttgagcataagccttggtaatatggacattggcaaatttaatgtttagcatactttcacttcaattgtttctttgtgtgtctgtgtgtgtgtgtgtgtgtgtgtgtgtgtgtgtgtgtgtgtgtgtgtgtggagtttgatgaataagttgggtgaatggtcagagagctctacctgtctcagctcccctagctctggaattaccagcatgcatcactatgcccagctattttactgagttctggggatagagttcaggttcttaaccatgcatggcaagtgtatttcaccagctgaggcatccacccagtcctgattccttttttttttttttttaatctccaactcgggaattttaaccaggaattttaatcctccatctacaggtgaagcatagttttattattctgtatgcttaagaccaaactttctttttgagcactgagtgggactgaaggctatatgggcatttgatgtttttacatcaattttaacataatttgcattcaaagttatcattgtggggttggagagatggcttagaggatgacctggtatttgattctcagaacccactcccaagagctgtcctctgaaatccacatgtgctctgtacagtcacacatatgctgaaataaatgaaactgtcattgtgttaataatagtggctttataactatttagaggtttgaaaacactgtgaatttgaaaggtaacatcaccatatcaaaatgatgtcacaataagaataatgcattggtgtaattctagaaaagtgcagctcttttaattttctactgagattattcctttgaaattatgtaggtaagactggttataaaccagtagtgtattatatggccaaatatctttttcagaaaaatgaatttactattattatttttatgaaaaataagggctttactagttgaatcttctcatatttaagcatgaaactaaaaatttgttttggaaaataatgacttcacaaagactgaatctatgctactatctaaataattgacctgtcatataacttgctttcaaagttgttgtcagttatgtcattgtaaagcaatgcaggatggtagtaaatgaatgaaaattttagactgaaaatatcccaactaatgaacctacgttactatagataaccactcataaaccttggatagattctagtttcttgtgtttttatattttgattactatctcaaaggataaactttgattttggaaaggaacattacaataactccttttgatcacccaattgtaattgtcatttatcctttagtatggatgatatttggcattagactctcaatgtacttcaatgttgtaagcaccaactacgaattttagaatattcaatagtaagcttaagaaaaaaccaaaagtgagaagtggtgttttctcttttcaagagatgccacatggaggttaattttaaataaagatctttttagtgtgtctgaagtcattcaggttttttccccctttggctagtactgtgtgctagaagcaaatttggagatcatatacaaaaagattttaagggtgaacagtgaaggatttgtaaaacttggatctttttttcaaatggtgttctttgaaagaggatcaggtctctgttgtgggatatttgtacactgtgtgaaaatgtattgctgagattggtgtaatcaaaagctgaacagtcaatagctaggcaggatgtataggttgcacctccagaaagaaagagagagagaaactgggaataagaatctatgtgtaaaagaaatgccaggagataccaggagacatggaacaagttggataacagaaatggaaaagaggtaaaaatgtcatgtggtagaacatagattaatattaacaaattaagttataagagttagttggggacaagcctagtctaaggcctatctttcataattaataaataagaagtttccatgttattatttgcaggatggtggtacgaatgaaacagtaccattataggtctcagttgctgtcaatatttcagtaaacactagtacattttgcaaagtccccgactgtcatggtgttgaactagagattccaagacctaaatctaattattggtctgagaattcagccacttagcgatgaaattgggttaacgatgtctttggaaatggatttaactaaacattttctgtataatgaaaagtcttgaaagaataaactaatttataaagactaactgccactttaacactcaagctagatgattgtcaagctatttaaaaatttgtggtttctttttagctttgttgtctcaattaagtaatttgtctttctaaagtgaggtcatttaacaaatggcttaaattattgtatatcccaataacaaaagcatacaagagcccagcagttgtggcacatgcctttaatcccagcaatcgggaggcagaggcaggccgatctctgtgagtttgaggccagcctggtctacagagcaaatgccatgagaggctccaaagctacacagagaaaccctgtcttgaaaaaccaaaaaaaaaaaaaatgtatacaagataggctctgaaatacttgaggcatgattaaattttcaaaatatctgataccaaattcccagataatatcagtaactgtcatgtgtccaatagtatgcaagtgagttatttttagttttttccttttctgtaaaacagtgctaacaagagtatatttctttgtgctccaggatattcattatgattaagcaggttagcataattattattgctataattataaatatttaatgttctaacatttaattgaaacaccccttttaagtacttagcatcatgttctttactttgccgatgggcaaagaaagacccaacatgtatgtggaaagcacccccacctgtaattaaaactgtgctggctgtttccaaggactgccttctccactactttactgcctcactagaatgaccttaagtcacatatataagcagtgaattggggacaattcaccaaggcattctataatgcaaatcaaacttttgttttcttgggttttaatttgaagaaatatattagtaccttgttgaccaacattactggtaatggttaactcaataccagttggtggtaaatgttatgctactcaatatcaaaaattatgctttctatgatgctaaagaggctgatctcaaagggataacctgaaagaatgcactcacagtagatatatgtgacactaatagataaattcatcaatttgtaattaagaattttatttatacataacaaagaaaaatataagccaaattctagaagaataatacataaataaaacagacacatttatattgtgataactgaagtaaagaaaaaaagaccaggatttcaattaattctgatcgtcaaacgtacttacagtgtcctcacaaacaggattgtgcttctctgcttgcctactttggccaaagggctatttctccttatatagaaaacttcaacaatggtctgaattgattgttcattctttggttaaattatcataggtccttcatatctggacatcatctgatattaaaggacaacccttaaaatcaaatattgcacctgtgtgcacagagcgttacctcccctcattaacctttaactaatgtaaacattggccaaaggattattgaatagaagtgatttagaaaacaataaaaatgataaccaattagagataaaaaataagcttaaacatataaaagccgttgaacctaatttacaaatggttctgcatctggacttagtttaaaaggcttatagtggcaaaaattgacttcttcataaaatagggcaccagttcttgtgactggatggatagataagccaatcttctcggggtgggggtgggtgaagaaacactgcccctgattgttaataacactttagttgtgtcatgtagtctttgtgaaatttactggttagagtttgaacagagtgaactattttagcatctatatttctacactagtattttaatatctagcagaaatagtgaagaataattattgttgggggaaagagtcaatttataatctagcacttagaaagctccacaatataaccaactggaagtatgttgaatacataaggaaacactggggattatcaaatagtaggtgtatttatatatttctgtatactaaggttccacttccactatgccctggtggtcattgatatccactaaatgtgtaaaggcaaagatgatactatattataaagaacaagttagaaaagttttactgttctaagacaatttcaattcagttcactagcaaatagaaagtagattttatgtttctacacccacttgcttaaataaaagcaggaaaacatatggtctaagagtctttgggccaggcattagtagcacatgcctttaatcccagcacttgggaggcagaggcaggcggatctctatgagttcgaggccagcctggtctccagagcgagtgccaggatagactccaaagctacacagagaaaccctgtcttgaaaccgccccacacgctaaaaaaaaagagtctttggaaaaaaatacaaaccctactagttgttgaaagatttcacctgaacagcaaactcctacttctttaccttaaatttcccttaaatctgattctctgcggtaattagtggggccacataagcttccaaaggggaatttagtttccagtttgcaacatgatgtttacttggcccactgtcctcatattgtctttcttctttctgttacccctgatttcatcttgggtttcagcttagttgtcatttcttacaggaagaccatccatacattgttctttatccataaatattggactaaggacttgattcctactttcctgtaagactccatacttacatctattcaaggactatttgataggtttttatagttattcactaggacacacacacacacatacacacacacacacacgcacacgcacacgcacacgcacacgcacacgcaccggcccacacacacttctgaagttcaagaactacgttttgttcatttactcttatttctccatgcctagaatttttctgtaacaaagtgtgtacatgatcagtatatatatattatatatatatatatatatatatatatatatattatacaatttaattataaaatatttaaaaacaggaaaataattgcaaaattatctgcagacgtttgtatatatgtttaactaacattttcaatatatacttttcagtaaccaactctgtaattaaagtaattaaaaattcacatgattacttttatggaagtataatacaaaataatatgcttaaatatccatgaggaaaaattggatagaattattattattattattattattattattattatttgttttttgagacaaaatttctctgtgtagcctcagctgtcctgccatttggtctgtagaacattctggcctcaaactcacattgatccacctgcctctgccttccaagtgctgggattaaaggtgtgtgccacaccacccagatatatataattatttttattactaataccaacagtaaaaaatttggtgataaagattggaaactatttttctctttaaattttattttaattgtgtaaaattgtgatatgtagtctagtaattacatatggaacaaattaataattatatacttgtatataatatgcaataatcaaattcaaacaattaatgtttctatttccctaaaatattaaaaaacttactagcaaaaaccacaagcagagaaagagagccaattagaatggcacgtattttggaaagtcaaagcacactcccagtaatgtacttccttcaaaaagcccacatcttctagttcttctcaatcgcttccaccaacgagggaccaagcattcaaatataggagcctacggggccattctcattcatactagcacaaaaatctctaaaataatgattatacattgctccagggaggaagatgggtaattagagtccacaacatttctgggtatcaacctgagatagttggagagcagatacactataagctggatacaagcagaacattggttttcataacatataaaagaaagtgatgtttggtcccctggagtctccacagttgtaggtagagttcatgagtttccacaagcttggttcagctgtctctgtcgatttctccatcatgatcttgacctcccttgctcatatgttccctcctccttctcctaacctggattcctggagcttggcctggttcttggttgtggatctctgtgtctggtttcatcaattactgagttcagggctctttgatgataattggggtattcattaatctgattacagggtaggcatcctctctactattgctaggagtcttagttggggtcctccttgtgatttttgggagttaccctagcacgaagttcctccctaagaccatggtggctctctctattaacatacctttttattgctcttccactgtatccctccccatctaggccatctagttctctcctgttctcaccccttcctgccttcttaccacccccaaaccatgtcctccatatgtgggagacaagtctgaagcttcaactatcagaggggccccggcagtaggtccacaatacaaacccagtgcatgagctagcttgtcagggcccattcccacgaagggatgccatgctcagtcttaatgcataggggaagggcctggccctgcaccaacctattatgaaagactatgttgactccccatgggagctcttacctgtgaggaggagtggactgggagtaggtgaggggagaggttagggagggtaggaggaggggagagggatggaagggagaactgtggttgaaatgcaaaataaaataaaaatttaaaaaatgggggggaagcagcaacaactaaaaaaggaaaaaagtgaagtttagaagcagaagagaggaagagaatccataatccattaaaggtttggcaggggtggggtgtggaggtggttgtggggttgtagttgtgggagtaggggtggagtagtagtgatagttacagttcagcccttgcagtacaattcactgttctcactgtggactgtgtacagtcgcagaatgttggaactcttcttaccacagagagagagcctgaagaaatttgcactctattttcaatggaaataagtagaaaagaagaggagaggagaggagcagatgggaggggaggggatgggaagaggagaggaggagaagaggaggaatcttttggcagcagaagagcagagattcaaagtcacaagtaacagtagatgcatcgctgagctgagagcaattaaccagttaggaaccttggggtcacataacatattgccacctcttcttaccattaaactgtattcaacaacatggcattttgatgcctctagataaagaatacttgtgattaattttaaagttatgaatctagtttgagccttaaacttaagaggactatcaatggacaaatcttgtatctgtccccaaccacctttctcaccatattggtgaacttaagccaaaagtcactaggaacttcttgtttatgtaagggaacagggagcttttgagccattaaatctacaagtagcattaggaagccccagatagattgtattaactcagtgtatttccctcttactccaatcttacgtgaattattggaatcatccttcccacatggaattctgttaattgggaggatgtaaccatcttcagtcacaacctcatactcttcacttgtataaccccagcaggaaattacctgactctagaaaagaaaagcaaaatactaaatttcatgagtttgcttagttggtcattgttatgcttctcaaaacaaaatttctttttggtttgtggtaatataatctatataaataaaacattcttatcataataaatgcaatgacttaaaatgatgaatgaaactaataacaatgtaaatttcatcagtgacaatggtagcttagaatattcatataagcttcaggatccctggttttttgattaaggaagcaaaatgtcttttccagtgtaaggaagatgaatattgtttgcagaaagtactgcattttaaatctgcaggtaatgagtcatgagcatgtagtaagtatcccagtgtgagctcagcttattggatgcacatttgtccactggtaagtctccatattgaaagttagtctcatcacctaatgagtcttaacagtgtttccttccctctcaaagaacagcctggatgaaatgaaagaaaattgacacactgttcataaaagccacttgtctctctcttacatttccatcaaaacttgcataaaaataacccaatctttctggaaaagctcacagacttttggagttgccccaacatctagtttagtacttagtatttctcaccttgataaaaaacctcttaagtatgctgatacagatccccttatagtttgacaacaagggaaggctaggaggaaaggtagaaggaagacagcctggcacgttgactgagagctgaatgagcagtcatctgtactagagctcatgagatcggcgggactgtgtctaattcacattgcacactgccagccttgccttctcaataactccaaatatcataaggattccactaagagtcttaaatcatccttacaagtgctcttaataaacataatgtataggttaaaatcccctttgcctggagtgactcttattagagtctagtctcttattatcttggtacttttccaataatggcacatttttctattaaagtttctgtgggaggaatagacacttgcatcatcacaagcacactgtactctggcttcccttcctcctttgatttctttaggttcccaaatatccagaccccaaacaagtgaaaaaagagggagaatgtatttttagcaatgtaatcaaggtcagagattcgaaattaagtcatgctttacctaaggtaagtataaactccacatattgccctctaaattgtaactgaaagcaatgagatttataatttcagagtttcatactcactgtcaccaaatacagattccttaggctttttgaagtataggtgaaattttattgcatcgttcccttcccactcattatatacagttgtgtgattgtgttctttggacaccctttcctaaaacgtacagtggcttcacttgcagtgaactttgccatttgcctatcaggagtcaaattctacataagctctcaacgtggacattgttccaaaacctctaccatgctccaatgaacatggggtttgtcacgcgttaaactcttcttctcacatcctttttgtctgagcaatctgtatcataaacaataaagctttcttcagcttttaggtgggataataatgacttatcaaggtagacttctatttaaaaccataaatatgactctggtctattgaggagctttgatggaaattaatttgaaatggagttacgtagagttcaaactgaatcactgaaatgtgaacaaagtcacatttctgttgaatgtgtcctgcctccctcataattctgtctatcctccattctcttttgttccccctctccacacagactcctgctagacccctttgttccctggatcattgcccttccactttcatatcacggggtcatgcactttggtatgcctacacagctttgcctatctatataaaatctaggaaacccaggagtaaggaaacattccatttgggtctgaggactgggtaattcatttaatatgattatttctggttaaatctattttgttgcaaatgtacacaacttctttcttcttatgacaaccatgttctatcatgtatgtataccacatttttctttatcaatttccctgttgttaggtaatagcatcagttttgtaacttagctactgtgaacagtgcaacgttaataactgatgtgtaactatgtctatagtaggttaacttggaaatcttagtaaggatggatcatatgggagatctatttttaatttttgagatatgtcctataactgaactaattataaaaacaaatccatatgataatattttcaaaacttggggacagatttaattaacagattaaatgaaagcattaatgaatccatttgaaaaaggtgttgggcttaagaaaaacaaatatccagcaaaagaaactaatgaccaatgtcagcaaacacactttcagattcccttcagaagtggagagggaaattctgggccatagagcctttccccttgtattgtaaagggactcctaatgtttctgtgtgctttcagttaaaaataactgttacaatggatgaaggactatggtcataactatgaaactcctctctgagacacaaaagaatccctctaatcatgtgactgtcagtaagtgttccaaatgatggaaaacggtaacaccagggaattcttatggctctctatatggaatgacagttctatttgatctaagaattacatgattgtctcaaggacaacacaaataaaaaagcttccttagttacacaatgcctgtagctaaggcattgtgatggaggataatactaccagtcctagaccttttttgtattccttgtcacttcagcataaaatggctgttaattgaagtttctgcgtaaacaaatgatatttatgtgagtactggaataaaaatcaacatatctaaatctgatgtttttatatcatgggctgtaatggctgtatctgttgtctttgaagctatacacatggtcttgttgtggaataccaaacgtataggcatgcagcattctgtggggtctagggatcagagtccagccagctttagaaatgcttctatctgctgagtcatctcgcaattcctgctttcattttgagcattatgattaactgagcattaagctttgtttccttaacattgaaatatgatgttgaattgaaggtgtttattttctaggtctgtagcaagaactaaattgagtatcacaggaacataaaatagcaagttcagtgcttcccttttcatttttgattaattaccatttcttagaaaacatgggaggtaatcatcttgttaactcatgatttatgtagaagcctagtctaagcttcaaggagaatccaggggatatggttgattgaatgagaatggtctccatagactggtaaattagaatgttaggtcaccagggagtaacactatttgaaaggattaggaggtgtggccttgttggaagaagtgtgtcattgggatgggctttgaggtttacaaagcccataggaaacccagagtcttcctgctgtctgcagatcaggatgtagatctttcaactacttccccagcactatgtctgggggtacgccaccatgctccctgccatgatgatgatggactaaatctctgaaactataataaacaagacccaatagaatgctttcttttatgaattgttgtggtcatggtgtctcttcacagcaatggaacactaagacaggaatagacaaggaaaaaatgcaatgaccaatgacatatcaaagataaactgattaggggaattacacatgttgcaatatgaagactacattttatttaacaaatagtatttcaatgttttgtgaatttgttttcatggatgttttccctttattcatccataaccattgagctaagaaacacagagtagccttgagactcttcttgttttattaggacataggtgagaaacacaggtgggaaaaaacagtgtttcttaaagttctaatcaaagaagagtcttagggatgttctgttttcataaggctcaatgatatctcccatctcctctaagatgttgtaccaatctacgactgttttacttcctgattactctcagaaaacagtcataaaaaaaccagatgaaggtccttttcctccctcttatggtagaatcactactgcttacacttcttataagttataaatatggctcaagaactcaaagtttcatgatcagcatctacctatgttctttgttataatttttaatctcaggatgaatttcaagtaaaggatcccatacaaccaaagtattgatactcctactaagaagttgctgtatgtcatatttggcaactagttaatatttgtccaaatgaattgtttaggtttcaccatagaacttttaaataaattataattttcttcctgcctctttgctcttctctgaactccctctccattttctttttactactatctccttagactgtcttgtagaactatgtgaatccacaaacacaatggaagtgttttccccagtggattccacctgaaaatgtagatcacccaccagagagctaactcaatgcaccatcttataattttgtctgcatgaggggaaagttctggattcttaatactcaacaaatgaagtgtgttgctcttctgcaaacaatacagtaacaggaggaatgtcatgtactgcacttgaacaaagaagtcatgtgggttttctggcatcccagggtttcctgttccacagaacatagaagtctttgtgcttgcagcattttgctctgccaattaaattgtagaatttataagatggagattactatagttttttaaaaaattgaaggcaaccaaacaagttaggatttgttttttttcacctcaaaggaaatttcccatctatcaagataaagaacatacttcgaggcacctgtgctttctttcagtcacatgaatgtttcatggaaacattactaatgagtataaacacactgccatttccaagtgctttggtaaatattaacttgaaagatcatatagtgcattgctgttacctgactctgggatcacagcatgtgctccaacaagtaaggtttgaccacacatccttgatttaccaatgaagctgttacatccaactaagcaagtaaaggcatagaaggagtatctctcaggtcagagatacctggactctattctgtctatcttgaggataatttgttaaaatcttaaaaaatattgtctaggtttctttgttagagctaatcttgttcagaatgttagcagttattcaagaggctttacaaaactcataattatcaataatgaccacttctacagagtgtgaacagataatagttatgaagcttaacaaaaaaagcccactcatttaataatgatgagtaggttatgtttggacttcccagttttggcctgcataattttcttttctgaaaaccatactcatcataccatcaggaatactcaaacctaaaacctggaaaaggttggcatcagtaacaattcatcataactaaccacatcacacaatgaatcccaacttttaaatctgtcagttaaggcaaaatccaagatggtaaagttcaaccatgaatatgtgaatttcaagtgtatttttactttttattggggtaacaaaaatgtggggcagacctgtggatgtaggagggaagatactgtgaacactatctttaagaccaatacctaccaatagctaggcaacattttcaataccctttatggtgaatggccattctaattgttgatgtctatagagagaggtttctgctttctgtctgtgatttcaacacaatgagggcaaatatatcatttcctcattacatgatatctatttattctccattcaaatatactggaggagagcttgcctgtcaggatgctttcccctagagttcttgttttctgcagtcctgtgccatcttttattttttattgtatcctccaccacccaacactatctcttgctggaagatgtgacttgtggccaactcctttggtgaacaaaaaaatgaacaactatgcaactattaatggctgacaacactattgttgaagcctgtctttcccatatctccctatcatatgttgtgctatcacagtgaagcttcactgtaaatttaagacactgcatatggaaacgttcctttagtattttaatcactgttcatattagattacactatccaatattctattacaagagccacaaatgttagatttgtcttatataaactttaatgtctctatgaaatgtagacttgtattgcttatttctacatttctttagacaccattttccctaaaagctgtctataactggacacccaccaatgctgaatttacaacaaatttcatatggttagcaacattattttatattactaaagaagccaagagaatctcattttaccttagtgcatgctgtgtggtatttgatcacattttgagaataaagtttgctttgaatcagaggatgtaactagccacagctggtcagaattaattatagaggttttggaggactgaggacagttaaagagacaggaaatagcaaatgaggtagactaatgtctcagacaatagtctacttttttcagagcaccagacaatttaaactctcagggttaagatgagtcacatgagtatagtgtataatcacaagggcaagtcacacatggcaaacaagctgcacatggcaaaaacatgtttttcaatacacgcatgtaaacacttagtaatagccagttgtaatgaataatgtaatgtaaactcactcctattcactacagctgggcataatccaagaaaaattccaggtctttgaggaaactgaggtcacaagattcttttattggatgccattttgttgctggtgggtttcttgtcccaccaggtcctgctgctgcttgtgccccaaataaacacacagaccctatattaatcataaaattgttggccaatggctggggcttcttactggctagctctcacttaattgttaacccataactactactctaagtatttctacaaggccttatcttacaagagaacatctggtgcgtcctatcttcccagtgtctcatggcatctccttgtggtctctctctgcctccctttcccaggattcccccccccgtctcctagtcccacttatctccctgcctctattggccaaacagggttttattcaccaaccaataagagaaacacatatacaaaatacagaaggacatcccccgtcaattttatctttctagatgtttacagtgtcttagatatagagagggaaaattttccctctcatgctgttttcttcttgttcactggattctctattcccttgtctgctcagaagcatttcagtttcctaatacatcatatgttgtttgctggatttatttcctgagcacctagagacatgcttggaagtccctgtccttacagggtacatcttaacatttcttctagtgcaggttgtatattgagtactttgatgcatttggatttgatttgggtgagagtggaagatatggatgtagttttgctcttttgcatagaaaatgattagttttcccagcaccattcattgaacataattggtgttgccaggaacggttgtgtctcatcatgaaaaaaccctagtaaaccattttaaatgccatattgtgtaggtcttgaaaggttttgaaggctgcttatccatttgaaatatatctctgtatatactgaaaacctagctaacttaagttttgactgttatagttgactatctattatctgtattcaattacacagtactttttaaatgaactgcataaacaaaatatctaaacaagagtagaaatatacatataataaaattgacctgaaatttgtattaataaaccaaaacccataccaatgcaaagtcttcatttctataagtctattttctttagaaagagattgactgtgatcattaaccatttataaccaaccctgtttaaatgaaagcaaacatttataagcaatatttgggaatatgggtacagttctctccaaactgcttcctgctggttggggacaatgtcagactcatgcagattttctttactgttattattattattattattattattattattattatgtttttttttgagacagggtttccctgtgtatcttttgctgtcctggaattcactcggtaaactagactggcctcgaaatcacaaagatcacatgcctctgcctcctgagtgctgggattaaaggtgtgtgccgccacattcagctatttctttttgaagcactttctctatcctttttctctcctctaccaattatacatatattttttaaacatactgtaatctgcttagaggtttttcttcatctgaatctgtctttactgtatatctctgtgttttttaatcacaggagtctttatctgctaaatagcatggccaggattaaagcagtggctggccccaccctattcattggcttcctgagagtctagcttcatggtggagatactgatgagagccatgtttattgccataattctggaccatgccaccaccaagaggcatgcagtcagctactcataaacaccttttatatgtttggcagcagggcctcttaaaagacccatgtggtttttgctgataatactcagtcaaaaagcctctctgaaaggagctgtgtttctccttgcctctagcaaataaagcctacctgagaaaatgctgctaccaataagttatgcttgattctgttcttttgtgtttagaatccatttttaaacttttgtcaagttttatgtggaaattcttgccatacatttgggtaccactatgtggagccaagtttctgtcctgctggatcccacagctgtttaggcccatataagcacatagaggcttatattaattttaaactgtttggctgatggctcaggcatcttattggttaactctctcataattgtcaacccatttctattaaactatgtatctccacatgatcttggtttatcagagaatgcccaggcatcctatcttcccagtagctacatggtatctgcctgactccacctactacttttctctatcccagtttggatttcccaactggctaaatcctgactgactattagtcaaaacagctttattcatgaaacaatgaaagcaacatatattcacagcatacagaaggagatcccctatcaactacacacacacacacacacacacacacacacacacacacaaacacacatatggttttatgtacctatacaaaatgtagtatccacaaatgggaataaatatgcaatgtttgtccttttgagtctggtttatttcacttaataagattatttccagttgtgtccatatgttagcaaataatataattttattcttatgtttgaattgaacttcatgggtctatgtgttctttagtcaattacctgttggtggatgtctttattgactgcataactttctactgagactggtgatgcagtacatattgatggcaggtaacttagtggtacattgatttaggattctggcagacatgctaatacgatatagttggatcatatggtaaatttgttttcattacttagaagcttctggattcttttgatcaaaacatagaaaacatttcccagaaagagtgcttcaagaaaattgagacagctatactgactctttgtttactgtagtagaatttatgtactgttatgatagagagatatggtagtcaacaatataatcaagtaataaattttagcaacactaatggtaggacatcccttatatttgtcagagatcatcactaagatgaaacacccgaaagatgcaaatgtagagagcaaagtgtttgtttgagtctccttgacagacattttcattcacacctgtagacatgtttactaatatcttggtacttcaaattttaagttggccatcaagagtgccatcatgataggggtattccaagatcttataatcttcttttatatagagaaatgcaatatgaggattatgaatctgttctccaaactctttattcagaaattcaaagaaatattaggcctgactttattactttactacaatgaaattgatggtgactgactatgctagagttgatacagtttaaatgaaacttcaaaactataattaaactcaatttaaaataaatttaaaatgtagaataacctgtaagatgaatatatatatatatatatatatatatatatatatatatatgtatattgatttctgtaaattttctgtaaaaatacttttccagactgagtattctacagacataaacacacagaggactaacaccctcctctcacaagatcatatttatacaaacgcttgatgtaaaaaccactctcctggagagtgatcctcaagtgcttggttattcagaaggatttctgtattcattcctgaaaattaaattactcattctttgtatgtgactctttcccactccctgtattttatacttgtttctaacccaacaccaaaaactcattgtgtttgcacataaagtatgggttactaattatttaaagttaaatgacaaataatatgaaagagctattacatttggaggatataaatgtaaagataattatattttggccttattaatattctgccttataaaaagagttgtttttagtgaaccagaggcatgttagacatgtcaccagaaaatgaacaaatggccccaccctcccctttttggtgactttgccccctacatgtcccctttgttctagtctatggacttgactttcatgtcatatgtagataattattttatttaactgttttatgaagttttcctggggagacacaaaggaagtccagttaccccaacaagcactaagaacaaattatcccttggtttcaaggaagtccaaattggtgacaccaagtagtttattgggttttctaaaagaacataggtgaggggatattaacagtagcatgctgacctacaaacaactgtatcaccacaaaatcctagcccatcatgaaagataaactcatggaagatgcaccactatactctatatgttgtctttaactgcattcattctggcaaagtatttgacagaattccatttgccgtagctggaccctaccttaaatgcatatggaatcatttgtaatcttgtgtgttatcaacatcaccttttgttttccccttatgtctggttccatctttaaacagttcttggattctacatccttgaaaatgtatcttcctctttgaatattttcagtgatgttcatactcattcagtaattgtgattcagaaaaatccttttgtgggtttctataagggtagttttacttcaaaagccaatgctagcaattgaatgcagtcccaaagttttgctactgacatgatatcatattacaattttctagaaaaatagaagtggtaaatttgcccctcaatacatgaagtttagtcattcaaaattaacattaagggaaatctgaaaatttttatgtgttacattattaaaacaaaattctcagaggatttgttttctgctttggtaatagctgaaatcttttaactaaagtgctgtggtttaacttgcattatcctagaaataataacgtttcaggatctgtctgaccatgacacctaaatcaatagtgttatccccatgaccctattttcttgattctggggtaatctggtgccagccagttgattgagccgaggcatatgagtgcagttttccagtgttccagagtgaacccagccactataaccctgtagtttatttgaagtgggggttggtggtaggtggggaatggggcagttgataagtagcattttgatactctgtaaaggtagaagacactggagtacaagcgcctagctacatgaaccagatttttttcatctttgaaatgtgagcaagtcttttggtatgaaaggaagaaagtccacagcagaaaatggcagcattctcttacggggggtatgttgttactctcttcaaggaaacagatcacccatgctgattgccaagcttggcccctgatagaaatcctagtgttctttgctgggaacatcctaatctgagagacacctgacttctgtgccttgtgtcttctgatctttgaggcagctgcagacatgagagcacagatgacttaacacagtagttggcaccttacctttttgagcagaagcttaatttccatccactgagcagcaatgagccaggaccttgaattgggcagagcatattaagttgcactgtgatattttctgtaatcacacagtgtactggttttctttgaatcagaaatgttcccactctgtttaaacattttgtacctagcccttggcactgtttagagaggttttgaatccctgggatggtaggcaggcatggatgtcattcaagaactgtgatagggcttctaattgctgggccagaccccattatggtccagcaccctcagttcatctggcaaactatatcccaatgtcccaccaccagggactgaaatactccagccctcatatcttccacactgatggtgaactgtgacctctgaaactatgagccaaacaaaaagccttcttgtaagaagattattgtcatgtatttcaacataaaaatgagaaagttgttaataaccatgaacctattatataataaaattataaatctcaatgtaaaattatctttacctaaagcagaaatacctgtacataaaatattgagtatgtactgtaacacacacatacttcctgcctggttccttgaaaataaattataattctctttgtgtttccttctatatagtatatgtatatgtatacttgtatatatatttatatatggtctacataaatatatgtatacaaacatatacttgtagtgaaatatagtatttttgtaaggaatcataaaatattacatgtgtgttcaactcacagaagcataaggtcccaaagcattttgtctcagtgtcatttttatttgtcagctgataaaattccttgcaatcccattctctgatagtcccatattctaaatgcctttacagcattgcatgtcacacatgcttttctcatctatgcaagtaactcgtgtttttcaagattttggacacacattttattaaaatcttattaagtgcttatatttaaaattatggttgcaaatatgagccaaatgattgcatactctttctttttctggccataacaactgacagaaatgaattatgagaacatagtccattccattgtggtggagaaagcatggttgagttgatggaagaatgagctggggcagacacttctcatataagcgctgaccagttaggcagaaatcttcttatttcctaacttttatctgctttcattgaggagactccatcttctatgtgctctgaagacaccaaaagcagttctatttttgatccatgtcctgtggatcaaaaatacaaacaggtcccttttgggtggattttctgattttattaaaagaataaaatttacgaagaatttctcaacaactgaacaaagtagaaaaggctacactgtgtacctggggaatagtatttttaaatccaacaaatggcaaaacattagtaaagaaaacatgttaaaacacctaagaatttgttagacaaagcaagcatctcagtagaaatagcaacagcaatgtaagcaggtaaaacacaaaaaccaatagacacattccctacggcagggaacagctgaggattgcctatagacagaatgagggaaaggatacatgatcacaaaagagagtatacaactgtctttcaagttttaactgtggtgtgtgtgtgtgtgtgtgtgtgtgtgtgtgtgtgtgtgtgtgtgtgtgtgtttgtgtgtgtgtgtgtgtgtgtgtgtgtgtgtgtgtgcgtgtgatggagaagtgtattaaaatgtaattgatggtgaaaacgtaatgcataagcagagcactgtcttcaaaatggctatttgaactacatagaaattggttgagatgtataaatgtataaatttgggacatgacagctctttgagtggttgggctattttaacttcatgggtttttttatttgtgagtccatggcaataaaggggtgttttataaagtccttgaaaaattcttgtcattatctaagaaaactgagaaacattataatcatatttacattaaaaatttggagagaccttaaaatcataatttaatgacgactaaattattaatcactattacctgaaggcattgtgtaaacacacacaaagcaaattcaaaaagagcagacacagagaaatagaaaaatttgcatttcactattttacacacaaaagaaaaatgccaaatgtgctttgttaaacattttatggttgaaattgccatctctatatgactttgacaatgagtgtatacacagtactaccctcgaagaacaacacaatattgaaacaatattttacacttaaaaatatctcaaatgattttatacctgtaatagatgtgtatgtgtatattatatatatgcattaagcattcaaagtgtataaattatgctttcagaaggggtgggtaaatttcatgatgtgtctaagatacttaggtcttttgcttattccaatatacaaagtttataatagtttcttagcctaggtataaatggcatctcatgactcaaagaaacataccaatactgaaatacttaatttgtggcagtagtacaaattggatggcgcttgatgagaaggtgataaaaatgaaagaggaagggatccagagtatgtggggagtcagaggaggaaaaagagtatttgtctcatggtaattctgtgtctaatatgtacagactcaatgtatttttattccaaaccagcatgtgtggtgaagtgaagcactatttcatctgttaatatccttttacaatccatgttgctctttaataacagtttagttctgtttatagatgaattttatggatgtcattaaattagacttagttacacctgccttttctgatattggacatagctcaacatggactagaacaagaaaagtttcaggaatatgacctggatattttaatgtaaacttgatataagctagagtaatttgggaagagagattcagaaaatgtatggcctgtagacaagtgtgtagaatattttcttaattagtggttgaagtgggggcacacatgggaggtacaagtcctggtcaggtggacctttgggggagaagaaagcaggcagtgccaaacagcgggagcaagccatggcacttcttcatgacccctccgttagtctgctgcctcagagtttctgctttgactttcctggatgatggactataagatataagatgaagtgaaccaactttgtcttcagagtttctgctttgacttccctggatgatggactatagtatataagatgaagtgaaccaactttgtccccaagttgattttggtcatggttttttgtcacagcaatggaaactctcactaacacagaagtcaggatgtctgatttaaatacagtatatattacaataccccatatagtgccagtgaacagtttatgtgaagacaaataagaaacacatggcttgtattttttctctaatgtgatgatatatcctcagttttacaatatcttggtaggctatagagtgtggatttgggaatgctatagaaatttggattcttcagttttgtataagccaaacagtttcgcttgcctttggggaactgcacgtcaaagttcttatcattggaaaaataaaacaaatgaagctggggacagtgggtgaggtcacatcccttcactcagaacttattcagatctctaatgttccacatccatctgacagatgtctgtttattctagcatgtgtaaataatccataaggaaataagcattcataagtgttgcttaatcctaccggtgacctgagttacaggtggtcataagtgtaccctgctcctcagagatggtaagttttctttggggtgattaaagaagactccctatgtttaaccccttttgtgaaacgtcaacaattgcaagcatggtaagcaatgaagcaagaacgtgactaaaaggacttgacaggctgggcatgaggaaggtcctgtgatgcccacaaacagctgctctttctgctcaaaaacaggaaaggcactcagcctgtttctctgtgcctagtcagccaaggagcatgaacctttcagcttggatggttggggccattaggaatccagaacattgcacctcacccacgctaaacaatagctgcatttagttatatcctggtggtttgaatgggtcaaagtctgagaagttctcacttaggaattcatttatagctttctcccactatgtcatcaaccatgacattaactcatttggaaagccacaagtcagccaggcgttggtggtgcacacctttaactccagcactggggaggcaggggcaggcggatctctgtgagttcaagaccagcctggtctacaagagctagttccaggacagcctccaaagccacagagaaaccctgtctcaaacaaacaaacaaaacaaaagaaagccatacgtggaagaatactttgatcttgagtttaatgtgctggtgtcctccacagaaccactgtgtttctgagtgtagaaaggactggagggccttgctgagaggaaacataatgaaaaatgaaaagggaatcatagagtgtagagaaatagagaacacagagggaaaaagaacagtatttggtaaaagaaaaagttgtgtctaagcctgtttgtgttaaaaaataatctacagatagtgatttgtcaaccataagccttgtgggctcatggtactgatgtctggccattgctaaatccagtgcctatgtctgctggcagagccttgaagtgatattggcatctgataaatggtaaacaggatgcataagatttcatggctcacgataaggattattcagtccattcacccataaaatcatgaatgtatcaactctttcactgatcattgattaacacctcacaatcaattatcatacattcttcctgcacatattcacatactcaaatcataggaagttttggatgaaaaatatcaccccttccctacattttacagaaaaaagcaaaatccatttttccaaatttaaaataatgaaagttaatgttttaaaaactatttcatctaaaatatttacaattctaatcaatacagataaaagataaaaatgttatcctctgatatgaattaaataagtggagaggtagacatgataaaaattgttcagacatgagaaaaagtttatttccctaccatcttttttatcacagatttattcatttatagtgttttcattcactgtttgttttgattgttgtgtcacgagtttctgtcaccaatggcacacttatattttatgagatgaggcttgatcttcattcttctatgtgttaatctccagtttccccagcaccatttattcagaggctgcctcttccccaaagtacattgtgtcctttctgcaaaaataaaatggttaacactgtttagttttcaattgttttatcatattccattgtattttatcctttacttttattctgttatcttgtattatttgcttcttttcaatcctgtcttttgtatttgtgtaacatacatgttgtttttattattatgccaagattagcttcaaatcaaatactgttatacacacagaaaatatataattgtagtttagagaataaagtgtctgggtgtagtggtacacatctttaatctcagcactcaggagacagaggcaggagaatttctgtgagtttgagcacagcctgaaatacaaagcaagtttcagactagccaaaactacctagtgaaactctgtctttagacagacagacatccagacagatgatagatagatagatagattagatagaaagatagatgatagatagatagacaaacagacagacatatagatagatagatagatagatagatagatagatagatagatagatagatagatagacggatgataggtagatagacaagcaagctactgaaaatccagtgcacgtatcctaaacctatctccctctattaaactgtggttccatccttccttaggtacagtctctctcattgtattaagaacattcccctgtatgtgctaatttctgcagaatgaattcaggaatctttcattctgttcctttttgcaaaatttcctattttgctttgttagtgaagccagtatttccctgtcatcctcctcttagggtaattcctctccagccatcccagagttcttagtattctatgtatggctattttcagacatattgattttacattgaccatgattagatgtgttttatgtgttgctataacaaaatatgaaaatcgattgtaagggcaacgattcttttacttccttgtgctggagattttagaatattataggtgcttgctttttgtcaattcttaataccaggtggaatcataaaggggataatacatggagagaaaaagtgatctaggaatcaagatctggggaaaatcagactttgtttttaatattatttattattaatgtttcattttactgtaattgtgcctgagtgcatgaagagtgtgtataagcttgtgtgcatcgtgtgtgtgtgtgtgtgtgtgtgtgtgtgtgtgtgtgtgtgtgtgtgtgcgtgtgtgtgtggatgatttttgtagtcagttctctccttctacatgtacctataatccagagataagaccaagctcagggcatctagaaagagggaaccttagttgagaaaatgttttcattagtctagcctgcaggcaagtcttggagcactttcttgattaaagatggaggttggagggtccagcctactgtaggagatgccatccttgggcaaatggtcctggatggtataagaaaagacactgagcaagccatggggagcaagccagttagcacaattaaccccaaagcctctgcttcctacttctgcctgatttcctgccttggcttctattaaggatggactatgactggagatgtaagcaaaatgaaccattttctcccaagttgctctttgctaccacatttaacacagtaaagaaatcacactaggacaataatcacgtgtgtcccccatgccttatttcttaacgctttaccatggatgcgtttttaatatctcccaaattagacagctctttttccttagttaaattacagaaaaactgctttcaaaacccgactttgtccatgtttgcaacatttgtaagtacacaactccattaacaacaaacagcaaaatgtctgataacattagttacagttcatagcagatggtcatatttacagttttaacaaaaatacatattgattaattatcccttcataatctctgaagaatgctctgatgtttaccataatggacagtcagggcactgggagccaagaaatgttacaccacatgagagatttcaggcatgcaaagctctgaaaaattttgggaccatgtccatcttgagagcttttcaaatatttggtttcttagcaaatgtcagagttcactgtaatccaagccactgtcccttgtagaaaaggtcttccaaagaacatattcacacagatatttatagagagaaaagaacaaggagaactaaaatttcacttacactccagaacacctagagcctttacattggtgacagtgagtatgaagttgtggtatttcaaacttcttaaaatttcaactcataattaacatatccatgagtgaaattcatgctattctaggcacagcacaactttcatttaaattcatcatcatgatctattgtactgaagttattttactagagtgtatctttcttcttttctccattgtgctttgatataaatggtttatggggtaaaaaactagaacagaacacagagcggggtctacagtttctgggctccatatcagtgggagagagaataatatgtgttgaaaatatttcattaccagtatttgtacttttcaaaaggtatgtctacaaagaaaattccaaaactgttagtggaatatatctgtgttaatatttctcaaaaaaaaaaaagggtgggttggcagtagtgactagataaagtccctctgagccacaagctctatatcacgtgactgttcatcccactttgctctcacataccctatgttatggtccttctatcactcttcttagctttattctgttgtagtcaagttgtcaactgttttgggttaacttgtgtaatagcttcattgaaaaagccagataatgattttgattaagttaagagaagatccaaatacatttccatgatatttttcaggaagtggcagagaattatataagtttcatgaaaagctaaggggcagaaaggtagttttctgaacagcttgggcaattaatttgaatttcatctaagttgtcttttggaaagtatagagatatttctgagtcttatagaatgacatggccaactttcaagtaaggaaggtgacagatagacataatgcatatccaataacctgagtttacatggagacatgtactgtatcaagctaatacctacctcccagcaggtttaaatgtggtggctactgaaaacaatttgccttgttcatgtaattggaaacatactttgtttgttgaaacccaaaccgaagaaccctgaagccaatatgaatattgtaagttattctgattaatcaacacacttcaaagattcacctctattagtttcactcattctttcccaattgttgcatgtacgataacctgaaatttctctttacacagaaattgttaatatactctataaaggaaatttactgaagaatcacaaaagtgtccagacgaccaaactaatgaaagtcaatatgttttctcttccacatttagagtgagattatttcctattggggctataaatgggaagtgtatgaagttgtgagtggtgatggttacattcttccaatttaccggattccatgcgggaagaacgagaccatggattcatgtaacagtgagtgacaacaagtactgagatttaaatgcattctgtgaaaatccctccatcagttacctctaataagaagcttccaaacctccctggattccacatgcaaatcaggagtatgtgtgatacctgccatggtagttcgtattactacacaaataaacaccatctgtctcataaatttagattttgcagaggataaaagctcagaatccctgcctaaaaggccaagaacctctaagcccactgactctgtaatgcttgagttgctgctgtgagagttcacaatatccttctaggtgatgattgctgctcctggttcattctgactatatgtttagatgtcccacagatgatattcatgttcaatgacttattgttgtagttatttattatataattttcatattgtcatttgccttacatgagtttaaactttttactagaaaataataaagcttgaaaattttataaattaaaaactttagggaaattcatatctattcaataaggagcaggaagaaaatgggatctaatgagcacagtgattattttactctgaagaaactgcatgatttttatttatatagcatgaggataaccagctgttaacacttctattcgatttacatcttcattatggcaaacacgccaacaaacaaaaaaacaagccttgttgcctttaatcacagcattagggaggcagaagcaagtggatctgttgagtttgaggccacccggcttgacataacaagttccaggccattcaggcttatacatggagacagtatcacgaaacaaaaacaaacaagcaaaaacccgaatccaacagttctatgatgagtgaaaatattatcaagtatttcctagggaggaaatagatgtcaaagaggataatagaagatgcaaatatgagaatgctgcaatgacatacatgcataaaatataatgagctccattattttgtgttcataaaagtcaataataaataacaaatatgttttcttttcagccccaaagacagtagtgtatttgcagcatggcttgactctatctgcttcttcttggattctcaaccctcccagtagcagcttgggcttccttctggcagatgctaattttgatgtgtggctggggaacagcagaggcaataattatgccatgaaacatgtgtacctagacccaaattctgaagcattctgggattttaggtaagaggaaacatcttttatcttggtttgttttccttaaagctatgtttaacacttataagttgtcacaaatttactcaatgactaaaataacttcattaaaatgtcataagaataatattttgaataatatatgatttacttttagtgtgtgtgtctatgtgtctgtgtgtatgtgtatgtatgtgtgtgtatgtatgtgtgtatgcatgtgtgtgcatgtagaatgtgtgtatgtgtgtgagtgtgtgtatgtgtgtatgtatgtgtgtgtgtatgtgggggtgtgtgtacatatggatgtgtgactatgtgtgtgtgtgtgcatgtgtggtgtatgtatttacatgtgtgtatgtgtgtgtgagtgtgtgtgtgtgtgtgtgtgtgtgtgtgtgtgtgtgtgtgtgtgtgcgtgtatggagcacattggtcccaggatttgcatccatcgccctagagctggagtttagatgtctgtgagatgttattgagacaagtaagtctcctgaagcatggagacatctccagctccttgaatgaatgatattttaaaaggttgataggtaaatgtttgcctaaaattttatattattaatttaaagataaaagcaaattttaaatatcatttctatatatctccttacttgtaagtactaatcactttgctattttgtctccttcttttaggaaatatttcattgaggtatatttgaatagataaagcgttcatattttgttcatacaacttgatgagcatatgcttaacttctaatcatctatattttttattttttacttttgttgaggcttttatatttatgaaaacaaaaacagggaaggaataagaggaacaaaacgtacaaggttcatttctatcacaaaatgtcagaaaatcattgagaaacttcttcctgtttccatttttgaaaatactctaatttattgatcattttaacatgtcttactcacatacaaataaaaactagacatacatatgtcatgggaatattatctggcatattatctaataaattcagatgtagaacaaatgcaattagagatatagtaagtcacttaaatagctctgatccttgactctgttcaaagggaccaaacaaaagatcatttcacagcattgtgagcattgtaggaaatgggggtgtgtgatggggagcatgatgcagagcatgcagtagatatttgattagtgttatctcagtacccatgcgtctctttggaaatttttttcaagtcagggtttcccctgaaaagataatgcttaattattataattaaccaaactccttaatttctgttttatacagttttgatgaacaaataaaatttgacattccagccatcattgatttcattgtgaacaagacaggacagaaacaaatctactatgttggccattcccagggcacccttcttggtatgctgtgagagactaaaatctgcccatcttgtaatttttaattgtaaaccacataagcattctttaaaaataacttcatttatagaaatgacattttgtcagtatttacaaacattcagactagccaaaaaatgaattcatttgttgcagtggtttaatttgctaacagacagccatgtttgttgttgtttggcacagagtattgctgcctaccccggctgggttccaccatgcaagcctctgactccacttctcaaatggttgattacaggcatggctgattgcacttggctaatcttcaaaatagcagatagaataatagatacattcattatctgctctttaaaataatcatcatttcaaagaaatgagatatgtgaacaatgcaaaaatgtgatagagtcacttgggattcttagcactttccaaaactaagcttaacaaattgttttttgatatccttaactgatttctgaggtcccagtgagcatccacagagctttgagtagtattttgctggaataatctgaggcatgctaatttacataatgtgactacaagaaaaaatgcatgcttccaaaccttatactccctggaaaaacatttctaaacaatttgcatgcaactggtttgaaaatagccttcttactgcttgagtactttgctggcagttagctaccatgcacatagtacactaaggaaatttacttctcctgaaactcacagtctatttaggaaagataagggatcaatagcacaggccctcatatttactgggccacatgttttctcttgaggatgtctttggaggatattcattctatgatgctaagtagtgtctggagtgtctactaactagatgggaattgtaacaagcaaaattgtcttctcatgttagtaatgttccctaagatcaaagaaatccttaatgaagaactagtgcaaaaatggaataatatttaccaaattttattgtgtttgtgtacacacacaaggcctgggattggaggaccatacaagtagaagctataaatatcattctccagccatagaagagggaatatccaactattagagaagattttaatgataaaacaaaaattaatttgaaattttggtgcccattaaatttttatgtctttttctaaagatagtctactcagccctcataaccaatcatctaaatgtgaaggtgtatacaagttttccatgcaaacaactttcagtatgaccagaaggaaaatacttaaaagatcaatgtaacagaaatgtaacattctagattccaattgtaagagagattaattaacaatcaggaaatacttgatttttctagatttgtcactttttaatttttacatttttaatttttatttatttattttgttaatgaaatgtattcatttattttacatcacagccacagttttctgtccttcctctactctcattcccatcccccacccaaccctccctactcctgtttctgaccagagagcagaaggattcccatgggtgtcaacaaagcataacatatcaagttgaggaaggactaagctcctctacttgtattgaggcttcgcaaggaaacccagaatgaggaataggttcctggaaaccagggtcttcacaagggaacccacagaaacaactaacctgggctcataggagttcaaagactctggatggacagcagggagcctgcatgaatttgacctaggtcctctgcatatgtgtgccagctgtgcagcttgatctacttgtgagacccctagttgtggttgcagggcctgtccctaatgctctggctaattagtcacttattttttttttgtaatacagcatactaagttattgaatatttagttaaacaaacaaaacctttcacagtgacagttaaaatgaggtccacatcaaatgtagcttaaagaaagtaacctagtggtgttcttccaggtgaatcaaattacccaagcaaagtttcacaaatatgacaaagaatacatgtagagtctctgttgtgattaaaaatgacacagaacttggaaccaagagagaataggaaaaagtaatctattctcttgttttctttcagcttatggggcatttgcaacaaacccacaggtggcacagaaaattaaagccaaccttgccctggcccctgttgtgactaccaggtatctgtcaggtgcctttcgcacgattgcatacgttgacccaacagtgatcaaggtttgtaatactttctaggaccccctcagaaatagaagttaggtgcagttttcaagaatattaatggtacccggctaaagaccagagatgctaaggcaatatcatgctgcctctctgcttggagtctttgtaaccacacagctcccccacagctggtactgtatgtcacaggttgccaggtcttgttatccaccagttgaccaaggttcttttttttttcttcttacccatctacttttcttatctactgaaacctttattaatagattttatcatacaactgtgcaatctgcatttgtttttaaagttttctatcatttctggttttcaggctgaaattacaatagagtgaacggaattatccccttttatcttctctttcttcctatagacttgactgtagcattcacttttccctgttgttttaaaactcattttaatcccatcttgtacaaagtactgaaaatatattaattataaatgctttagtttgcagaaaagctttagttggatagagggttttgcattataaacagtctactgatcacatatcttttgtattcttgctagagtttgtctctttaaaatagtgagtcatctaactgacattgagttttattttgtttggcttttacttgcaattatggccaatgactcagcatcatttcatttatacagcgagttgcacctgactcttcttaactaatactttctgatttttttgttttatgcatttacatagatacattctctaaagcagataaaactgccagctgttcttttctcatacatgataatgattaacagcctctactcagggatattaagaacagagaaaaccactttcttaatcttacttggaactctcttgtcctagtttagttgcagatcagatagtggaacatttagccttgtcaaaacctacatgtctggatcagtcccatgctgggactatcagactggggagcaagagttccaaaccccaggaacatgggtttctgtgaggaaacctcagaaatctatgggacctcctgtagaagcccagtatttatccctagcataggtgtggactttcagagcccattccatatagaggaatactccctgatccaagacacacgggggtgggcctaggccctatcccaaaggatatgaaagactctgatgaccccctatggaaggcctcaccatccagggggagcagaaaagatatgtgacagataaggttttagttgggtggggggggatggggagttcgggtgggagaagggaactgggattgtcatgtaaaacaatcctgtttctaattcaaattaaaaagttggaaaaacaaacaaacaaacaaaaaaaaaaaacaaatcctacatgtcaactctaaagttcaaaaaggtgttttctctatagatcaaatacttttcctttttaatgtttgtttttattcatgcatatttggatgtgtctgtgtaagtgcatagtgtgtgtgtgtgtgtgtgtgtgtgtgtgtgtgtgtgtgtgtgtgtgtgcatgtgtgtgtgtttactcagaggaccattagaagccctggaattggattaaaagcagctgagatctgcctgatatggttgctgagaatggaactcatgtctctggaacagcagaaagccctcttatcactaagcatctctccagcacccacatctttttttcaaagttattttttttaattttgttatttacaccatttaaagtcagcatgcgtttttgctaactaaacaaagcacaaatttaaacaagtatgcagagagttggtattttcatgtgttagtggtaatcccaggctttagtgactgaaccatctctgttagcctgttatttggaacttcaaacaatcaaaaacagagtatcttttcattcaattaatgcttcattaacttttctgggtttgttttccttgatatctgatagtctgttgataatctatggcaaaaatttatttcatttttttgaaactgcatcttacaatcttgataaactcattagctttgcacacttttttgaagatgtcatgttttatgttaagaagatgagtttttcttaattgcagtctttctgtttttagtttttattaaattctttaattactactcatattacatatccatccccctcattccctcaccctaccatcttccattgtttcccaccaatccccccaacccatcccccaactcctccccagggatagtgaggccctccaccaggggccataaaagtttgtcatatcatttgggggagggcctaggccctccttgctgtatctgggctgcaatagtatccctccatagggaatggactcccaaagtccatttgtgctctagggataaagactggctctattgctagaggtcccagagattgtcttggcctcctagctggcacccacattcagagggcttggtttggtccaatgctgtttccccagctttatgactagggtctccatgctctcactaggtcaggtcaactgtttctgcagcaccattttggctcctttgctcaacccttctccctcttcacaactggattccaggaatatggttcaatgcttagctgtgggtgcttgcatctgctttgaacagctactggatgaaggctctaagaatgataaccaaggtagacatcaatctcattataggggaagggcaccaatgtcattttctccaccactgcttggattcttagttggggtcattcctgtggattccctaatagttcccctgtgccagacctctctccaaacctgtactgtctccctctttcaaggcttctcctttcttgccctcctctattcccctcctgtttcattcctcttgttctcctccccaaacccttgttcccttcccacctccttccacccccccattctcccaccttgttctggggttcttgtccctctcctcttcttcaagggagtaagcaatcttctcttggtgtcctccttctttcctagctcctctggcagtgtggattatagattggtaattctttgctctatgtcgaaaaatcatatatgagtgagtacataccatgtttatcttttttgtgactggtttacctcactgaggatggtttcttctagttccatccatttgcctgaaaatttcaagacccattgatttttttccgctgagtagcactccattgtaaatgtacattttctgtatctcttcttcagttgaggggcatctaggttgcttccagtttctggctactacagataatgctgctatgaacatagttgaacatatttcctttgatggggaatgtgctgtgtatgttcatcttattgattattgaataaagtattgttttgccaatgaggcagcaagttaggcaggactaggagtcaaaaaggattctgggaaatgtagtagcaaagtgacatagtgaggagactcatatttaagaaaggggaaacaagaagtatcccctctttcccctctgctcctcctctagcggcacaatgtgatcaaccagcaagggagggtgccagcggaaggcatcctctataagataagtctgtcttataaaatatatagatttatgataattgagactgagctaacagatgagaatcctagtcattgggcaagcagctttgtacctgatacaactttctgtatattcatttgggccctaactcaggtgggcagctggcataaagcacacacatggagatggggctcggcagcttttggtggaaagatttataacagtccttagtgtatgaatgtgcattctttgggtatatgcccaagagaggaattgctggatattaaggtagaccgattcccattttcctgaaaaactgccatactgatttccaaagtggttgtacaagtttgcactcccaccaacaatgaggagtgttcctctttctccacatcctctccagcatagactgtcattggtgttattgattttagccattctgataggagtaagatggtatctcagagtggttttgagttgcatttccctggtggctaaggatgttgagcactttctcaagtgtctttcagccattttagattcctctgttgagaattctctatacagttctgcactccactttctaattgcattgcttgttgtttggtgactagcttcttgagttcattgtatattttggttatcagcactctatcagatatggggttagtgaatatattttcccattctgtgggctggcattttgtcttgctgactgtgtcctttgccttacagaagcttctcagtttcaggaggtaccatttattaattgtcgatctcaatgtttgtgctactgtagttatgttcaggaagcagtctcctgaaccaatttgttccagggtaccatcttccttctcttctaggaagctcagtgtggctgaatttatgttgaggtctttgatccatttggacttaagttttgtgcattgtgatagacatggatcaatctgcagtcttctgcatgtctgaatccaattatgtcaacacaatttttgggtggtgctttcttttctccattgtataactttggcttctttataaaaaaatctgatgtttgtaggtgtttaggttaatatcaggagttttcaatttgattccattggtctatctctctatttttgtgccaataccaagctgttttcagaaccatggatctataatagagcttgaatgcagggatggtgatacctctggatgtttctttattgtatagggttgttttggctatcctgtgctttttgtttttccatatgaagttgagtactgttctttcaaggtctgtaaagaattgtgttgggattttatgggaatttcactgaatctgtagattacttttggcaagattgccattttcactatgttgatcctacctatccaagaccatgggagatctttccattttctggcatcttctttaatttctttgtttaaagactcaaagttcttactatacagttcttactatacttactatttcacatttttgattagcattacccaaaggtattttatgttgttagttgtttttgtaaagggtgatgtttctttgacttctttctcagtgcatttatcatctgtatgtagtagggctacagatatttttttaattaatcttgtatcctgccactttgctgaaggtgtttaccagctgtaggagttccctggtagagttttttgggtcacttatgcaaactatcatgtcatctgcaaatagaatagtgttagctattctttgaaatcctggtaaaattctgcagtgaatccatatggccctgggctttttttttttttttttttttggttaggatacttttgatgactgcttctatttcattaggggttataggtctgcttaaattgcttatctgttcttgatttaattttggtaagtgatatctatccaggaaaatttccatttcctttagattttccaattttgttgagtacaggttttcaatgtatgacttgatgattctctggatttcttcagtgtctgttgttatgtcccccttttcatttctgattttgttaattagcatgctttttctctgccctttagttagtttggataaatgtttgtctatcttgttgactttctcgaagaaccaactctttgtttcattgagtctttatagtgttttcctagtttctactttattgatttcagccctcagtttatttcctggtgtctactcctatggggtgggttttcttccttttattctagggctttcagttgtgctattaattctctaatgtgactaatctccagtttcttcatgtgggcacttagtgctatgaactttcctcttagcactgctttcaaagtgtcccataagtttgggtatgttgtgcctacattctcattaaattctaggaaatctttaaatatttttatttcttccttgacccaggaatggtgcaattgggcatcattcaatttccatgagattttcagtttgtgcaattagtgttgttgttgaattctaaccttaaagtatggtggtctgataagatacatggggctattccattttttttttttttttgtatctgtgtaggtttgctaccttgccgaatatgtggtcaattttagagaaggttccatgttgcgctgagaagaaggtatattcttttgtgtttggatggatgttctatagatgtctgttaaacccaattgggtcaaaacttctgttagttctttttttttctttgttatatttctgtctggtggtcctatctagtggtgagagccctgtgttgaagtctcctactataagtgtgtgaggttttatgtgtgatttgagctttagtaatgtttcttttacaaatgtgggtgcctttgtatttggggcatagatattcaggagacttcatcttgatggacttttcctgtgatgtgtatgcaatgcatatttctttggattgattttagtttgaagtctaatttattagatattaagattgctacaccagcttgtttcttgggtccatttgattggaaagccttttcccaaccctttactctgagggaaagtctaactttgacattgagatgtgtttcttgtatgcagcagaaggatggattctgtcttcgtatccattgtattagcctgtatctttttataggcaagttaagaccattgacattgagtgatattaatgaccattgattgttgattcttgtttgttttggatttgttggtggtggtcttattatgtgtggattttccccctgttttcttttggtgtttggtaaagtgggattatctattgcttatggtttttgagtgtagtttatctttgttgcattggtgttttccttgcagtaatttctgtagggctagattcgtgcatatatgttgcttaaatctggttttgtcatggaatatcttttttctccatctatcgtgattgaaagctttgctggacatagtagtctgggatggcatccatgttcccttagcttttttagaacagctctccaggatcttctggctttcaaagtttccattgagaagtcaggtgtaattcgataggtctgcctttatgttacttggcctttttcttttgctgctcttagtattttttctttattgtgtaagtttggtgttatgattattatgtggtgaggggacttttttgtggtccaatctatttgttgttctgtaagtttcttttactttcataggcatatccttttttaggttggaagtttccttctatgattttattaaataggttttctgtacctttgagctggtttcttcaccttcttctatccctattattcttaggtttgttctttttggtgtcccatatttcctggatattttgtgttagggatttgttggacttgagattttctttggtctattttctttggtcttcaacacctgagattttctcttccatctcttgtattttattggttatacttagatcagtggttcctgattgtttacccagcttttctatttccagcatcccctcattctgtgttttccttattgtctctgattctgctttcaaactgtgaagtgtttgagttgtttcctttacttatttggttgttttttcgtgactttctttcgattctttaagagatttgtttatttcttgaattttttggtttatttttcctccatttcatgtaactttttgtttgttttttcttctatttctttaagggattttcttgtttcctctttaatggtctctattatcttcataagaaaaattttaaggttcatctcttcttcatcctctgtgttgggcttctcagctcttgctggtgtggagtcactagattctggtggtgtcatattggtctttctgttgtcaagtgtgttcttattctgtcatcttcccatcccttcttccagtgggtgcaggtggggtctctctctctctcttctagtctcctcaagcaaagggcagagggcagtgggagaaccaagagtgaggtgtgtctggactcagagtggaccttccggtctgggtgggtccacgctactctaggagcatgctcagaaagaagctaggaggatgtagtgggggaagtttggggcatagtggcactcagactcacctcaggtggcaggcagagggcaggcagagggcagagggcagagatgttttttgtctttagaacatttgctttcgatgtgtgtatgttcacatgtgtatttatgtttctgtgtgggttattgtgaatgtgttgttcttttgctaaggccaaaaatgagcaacttaatgatgcacacacatggcaagtgcaaactaactattatggattcagggggaaactttttttacttttaagatggttatagtattaattacagttgtaacatctgttatacttatttgggtgtgtgtgtgtgtgtgtgtgtgtgtgtgtgtgtgtgtgtgtgtgtgtgtgtgtgtgtgtgtattcatacacttggtggaaaatgtgtacggtttttgtgggaaggcacaaatgtatgcagctgctcttgcatatttgtgcacctgcatgaggagccaaatgtcagtgtctggagaatttctgacttagtcttgtcttcttttgagacagcatttctcagcaaactcaggactcaccaattggctagaccactggccattggactgaggatctgcctgactcttctaaccctgggtttgggcagtagacatacacctggcttttgggcttcttaggatttgaactcatgctctaatgcagcagatgctttcccagctgaatcatctcagccccatgcattgttttgtagttctagtatgccgagaatgtcaataacaaacatatattcaatgttgttgatatgtcatctctttctatggaaattacctcttgattatcattccttttcagtcagttaatatggtccattgtgtctacagatttttctgaaagtttagtcccattttcatttcattgacaaaccttacttcttcttaatatattattggttttttatattgatattcattctttcaaaacattaagatgtcttggcatttagagttctgcaagctattacttgctgctagctttccttccaaccttcttttctaattatagtgccagggtaaggaaaacctcttgaaatagctggaaacgactctctttgcttcacttctatcaaaggcattgtgtaattatagatgctttggtatttgggagatttcagtagtgaaataatctggttatggattttgtttatttgaaagtttaaccaacaaatgatattttactagcccaatctttctaacacttgttttcaaacagtctgtctattgaatctattgaagtgatattattattatggaattatttcctagtgactcatttaagagatgcaggatactgttaggtgttgtggtgcacattggtaattgctgtaggcagtaacactgaggctgaaggatcactgtgacttccaggccagcctggtatatagtgccaatcctcatctcaacacaaagtgatgcttctttatatgtctcagtctctactgaattatttggccagcctttcagctctgataagcttggctagaggtgtcatttgataatttcctggaggaatcaagccctgggtttattgactttatttatttatttatttatttatttatttatttatattagatcgaattagaaacaagactgttttacaagtcaatctctgttccctctacctccccttcttacccacatgctaccaaccccccaccccaatcctcctcttctccccaggaagggtaaggccctccatgggggatccccaaagtctgtatcatcctaggcagggccattaccatatactcttgatttaaaagaaaagtacttctaatatttcttgtatcattagccattaattatattggtttctttacttgtgaataaccttattttaactaagtacataaataatacttttgttagtgataacattttaaatttagaggcttgagccatggcttagtggttgtgagtacctttcttgaagagggctggagttgtgctccaatgacctgtacccactgccacctgaaatttcatctctgagaacctgactccctcttctgatctctgtgggcaatgtacataggcacatatttacatatataaaaataaaacatactttaaaagaattttaaatatagagctttttaaaatttcactgacaatttaaagatgttgctttatactttttctatttttcccagtgttaaaaaacaatcagttaccatggtcataagatttcctcagtataatgttcttttctcctagaccattggatttttctcattcttatttaaatcaatgtatcacatgtctctgtaaaacttgtgtatccttttttagtcttaagtccattaagtttgatgctgatacagcaaaatagatgaattaaataaaccttgaaagtttatgagttcagggctttgatgggcacccatttggtctgcactcagtctacacaaagtacatgcatggttttcttatcaccatctgggtatagagtatcttgatatggctttcactgtagcatgttaatgtctcctagaacattattcttcataagagtctctatttttttctaagacattacatagactgttgaaaatttttttattaaattctagagacatcaaaagtctggatactttaatcagtattctcattgctgtgaccaagagcatgtttttttatttgtttttggttgtccttatgacacaaatctaaaacatgttttcctgataaatttggtaaatttgattctattcaaaaaagagaagggtatctgttttccctctgtatgaatattagaaatcagttgctttttgtgctgttttatcaagttcctctattcacagtcattttgggcttctattccttacttttcaggtagcctttacaattagtttgtgatatcagacttttttaataatttaattttgatagaatctgttgtcatgtactgagcttgtaagtatgtagaggcacttggagctgtgcctgctgatctgagttcaaaccctgagacccacatgatggaaggagacacctgaattatatcctctgaattctacccatgcaccatggcatacaaaactttataaaatattcttaagcgtcatgtactatagatatttcttttcattatctaactttcacaataattactttacatagcatgtcacatatctattttttagacattagtttcttcattagtttgatagatttatggcttgcatgaattaaaagacactgctgcagatgtagacataaatttttcagtacttgaaaagccataattctctctcatttaaaaaatggcagaggtaatctccatcacctcagataattcattatttataaaagtgttctgtggagcagaaaataactatttcagggcataccacttaggaggcagaagatgtcatagtgcacaaaaccatataaatttatcagtatattgacatgttgcattgcaactcaaactccttctgtcattgcttcttactggacaatagtctcagaaccattatttaaatatgtcatttttcagcaagtttttggagaaaaggatataatgaccggaaaagatgacaaccatatcattcagttcatttgccatcggcagacaatcggaactgtttgtaataatctactgacactgctattcggatataatccccaaaatttaaatgaggtatgtgtgatttttgtcttcaggtcagtgttttttagtagtgattactaatgctatcatcttattattaggtagacattaaaaatacaaagtaattgctcataatatagaacaacttaactgacataatatgaatagctcattttataaaatttggcacagtttgcatataatttcaaagttatgaatatggccataaaatccatctattgtatatatggatgaactaatatttttctcttatttcttttcaataatcacattaagattaagacttctttccagaaaaaagtttatctccatcacatactatcatatataaaacaaacaaaaacacttaatttccatgctgtggtcaaaatccaatctttctttttaattgattcagtaaagatttgatcataaaagtcacacagttctgcaatactattttaaactctcatactcttagaaagacactatcccgctctcattcacccagctctctctccctaccctcatgctcccaattagctcaggaaatcctgccccttcccttctcctggggtccatgcattcctctcttagagtccttcttgtttcctagttcctttggtgatgaggattgtaggctgctaatcctttgctctaggtctaaaattcacatatgaatgagatggggaggagaggcagggagaagaggaaaaagagtatcaggaaggttgggtcagggaagaatagaggggggatgagatgggggactagtggggcattaggggaaggggaaggagagggagagaggactgagatgtgaagccaccttgtttctaattttaactaataaaaaaataatctcttggaaaaataaagaaagacactaaccatgttttgctatttcccagagtcgtattgatgtgtatgctgggcaaattccggcaggaacttcagttaggagtatacttcattttgctcaggtaaactttttctgtacttcaattccttttctcttttgcttgaaatcttccctccttgatgggttgtgtcaatactctatcttgtgatgatgatgatgatgatgatgatgatgatgatgagagtagatagtaacaatgatatctctgatgccaagaggagaatcactgctctgtgcagaaattttcattgtgaaaaggattttttccattcttatgtcttcttctaagcagtaacttttattttaaaacttgtaaattttcttggtgatctgaggaagctggcctccaggagaactgaggttataaacccagcccagtccagaagcttttgaccatagagggtagagatgattggtgctagagcaggatatcacagataggatgactgaacattgtgttatctaaacaagaaaatatatttaaatttaaaaacatagaaaactagtataaaccttgttacataaaattaatactgatttataaatatcaggtattagtgaaaggtagaaattttaggtgcctttgaggtataagcataaattgtgaatcatttccttcatacattttaatatctccatgacaacaaagaggaattaagttgaaaaaggccttaccctaccaaggccattgccaggatgtgagacagtacctatgatcaggatgtatatcctcttatttggaatttcttcttcattcatgggtattcatttttttataattcatgtctgagctatattattcattttgctctggactcacgggtatgaagtttctggctcaattgggcaataaccataagagtgacatgtgtcagattttaacaggtattttgaactcttatcttgactggagaaatctgttaatcacatctctgtcctcccagcattcgaacactgtgaaaaagtcagtgtacacatgtctgaagactagactgctatgaagccctcattcctcattgtttttctagagctaaagcaattgggttttcaaaacacagtgctattatttgacaaaattaccttcgtcataggaatcattggaaatattttacacaaaataaattctaagtgaatgagaaatagttcaattgtaatttatttctgatagaaatgatactttgtaacaggtgttgaagtcaattaaattttatttttaaaatgtttttccatagacatcaaaatattacctcatttcttaatgtatagctttattgatgtgcatttacataatttaaaagggtgtgtgtgtgagtgtgtgtgtgtgtgtgtgtgtgtgtgtgtgtgtgtgtgtgtacctgtgtgaatgttcttgtatgatggtggacagattgtgtgtcagtgtcttggataatgtatgcgcttgcatgtggttaccagagaatatccctgagtgttgttttaagacactatgcaactgctttctgagatttctctcaatgttctgaaactgtctggggagcttaggctttctgtggaaggctccaggaatctgtttctctgccttctgagcattaggatttcaggtaaaaactaccactatctggtttttcattcagggttgtggcaactaaatttaggtcctggtgccttcaaagcagacattatactaactaagattattctccagttctaaaatatttccctcttaactattatttaccgtttgaattctatgtatagtactaaatttaaatattgtgaagtttaatgttataacaagtttacattataaaataccttgtgcaacactcatcccttatgaaatcataatactaaaattttcacatttcagtgtcttcctacatgtgataatatcatacataagtactactatatatattttgttttgtttgttttttaattttttattagaatcaatcttattttacatattaattccagttcgttctccctctgatcctcccatgcccccccaaccctctccctcctcccctttccactccacatccattccccagggagagtgaggcacagcatttggggcagggcctaggccctcccgctgtgaatttaggctgaaagagtgtccctgcatttgtgcactaggaataaatactggttccactgcaagaggccaggcctcctaactgtcacctaagttctttaattcctagtaatttgctattggaagatttataagcaacagcatattttatctttaagggaatcagaaccggtttagtccaagcttataactggggcagtgaggctctaaacatgcagcactacaatcaggtaagtgtccttttactgattgtaatgattcctcccttttggaaagtatatgaaagttctgaagaaatgattatttttaaaagattgctgaacatttttatacttcccaaggtattagtagactgagcccatagggcagctttaaaagattgaaaatacttcttttcataacaattcacatagaaatatgtatatctataggttatccatagtaatagaaatgacttatctgtagaaatagaaaatagcttatctatagctataaaaaagtatttcaatagattatcatctgaacttcacaacaaccttacaacatatcagatagttattgatatcatcatctcaaccataaggatgtaaaattcacaggatttctagtttgataaagttattatgatatttgataatactttaccagtagtccattcctgccttgacaaatgttgagtgttcataaatgctgtctgtgttctgatgtatataatcactgaattgattcataggttagaatttaaatcttacagttcctacattgatatgttataaataaaaacatgctatacttcattttctcttagtctactcctccaatatacaacttggagaacatgaaggttcaaactgtcatatggagtggtgtaaacgatattttggcaaatcccatggatgttaaaaacttggcagctaaaaccaacaatctagtttatcacgagaagactgaaaagtataatcatgtggattttctaattggtaaagatgttactgtaaaagtttacaaaaatttaatttcatttatcaaaaaagatcaatcaaggtgaagtttttgcatgtatttttctgcttattttgaagggtactatgctttttcttaatgaaaagcatttcttgatttcctctttctttttcaaaatctttgatgtagccctagctctcctggaccttgctctgtagaccaggctggcctctaactatagagtctcctgcgtctacctcctgagttctgggattaaaggcatgtgtgaccacacacaggcgtaatctttgatttttaatccttgtataatttatataaattgtttacatatgaaaaagaaagtttaattctaataaaatgtttaattcatcttgcaaacttttctaatttatgcgtattaatttatatatcactgagaggtagactctgagcacagggctaaattttatctgaaataatattccacaatagtgatgcaggaagaggacacatgatgtgtctctggtggatgctgactataaactgcctctcatatttatagagatgtcttttactatttattataaaataaaattttgggataaacattaaagataaaacctgagataattacaatcaaccatgacacacaccgtcaaagtccatttccctgctcaaaaagtccctgtaaccacttttcaccatatcatcctcttcagaaggcctttccttctcttgtgctatgtcttcaagggaactccatgacacattccagatagttgaatgtgaacactgcctctcaaaccaaatgctctatttcattggatatcagaccacaacatagatgaaattcttataatattttccccttttgtctaataaaggaaaagttctaactctaacattgtaaaactatatacaatgaaatcattatcatgtgttctccaaatagaaagaaaaggtattgaccttaacaaaaggacctatatacaacagtaacaattatcaagttagaaatacattcacaatgactagtcaatttgtatttggcaaattagagaaaatactccatcatctgtccacttctgaagagtccaaagtttcatatctaatttattttctaatatgattatggaaaactgtagcagttaatatgtagtcttaaatctcatcagagacttgagaagaacataatattacctgagcaaacaggaattgcagagcaagcaatttccaaaattataagaatgaaagaaacagctggctgcttggatagtcaccctaggttcctatgtgatgttggggaatccaacttcaggctacagtcctagaatatatgacagacattttggagaggcaggaaagtttgaaggacttaccatgtttggaaaagtttggcaatcccttttctttgtgtctgtttgtccagtttggacagcatacagtcaacagttgtagcaaggaagtttctttcccaaatggccagcatttgctacaaaaagtaaagtccaattttggaagttctttgagggccttcagccttttttcaggtagattggtatttccaggaacaagcatgtctcattgtcaagaaaagcctaatgttattaaatcatattatatttcatattctgtaggtctttgaagtgtttgaagattacccacctatctaaaatatatcgctgtgtgactttgaaaacacacctaacgtgactataagtttgatgtttaaggatgattattgacctgtatttctttattatcctacatagcttttaaggactaaaactttatgttacataactaaatgagctgcataggtacaatatcttaaacaaaaatagaaacatatgttcagtataataaaataaccttgaattggtatcaacatacaaaatatcttaaataagactagaaacataaactttaaatttgtatacatataccaaaatccatattaatgtaaaattgtttaaaattaatagttgctctaagatgaaagtagattcagtagtctacccttttccctatcatgcctatattccatctttttttcttttcagaaaatggaccactgaatctaactttgaataggattttcttgaccacatccagtaactatttgtaaccaatatctctaaacagtgacgaatgtttacaaatccactgaatgaccaaaaaacatctgccccacctcttgggaatgtgggcatcatgtgctttagactttttcctcctgatatggggtgctggcatgtttacaagaccctgagaaaatagagattatgatcaagtcctggggaatccacctgttatccagtcttggtatgatgataaattgcaaggctatctgaactcctggctggagtagcctaagaggctggactatattaaataactgtcttgaatttcgttggagcagtttgtagtccaaagctgatctttggatggcattttacagattagtggtgttaccacaatcacaatgtgatcatcattgtgagacaccttcatcttttggagacttcaaaggtcactgataggattgttcatcattcactgtagaaaatgtaaacattttaagtgtcatatgcagcagatctaggaaagtataaatgaccacaacctattaaatatacccaggatacatagtcttaattcctaaatacttgctttagactcaagcctaaaatcacacactgaaagttacatgaagcctaaagttagaattacttagtactgtatgtgaccattaatatcaagacagaaaatttaaatttgagataatagttattaataaaagctttaaagacaaaataaatcctagggatataacattaatgacaatataatagtccatagattttgcttttcttctgtctcataccaggtggctcttctgacataagacagagattttggattttattttaacaaacatggttggctttagagaaggggacagccatgctccaactccaaaaccagctttagtttttaattgagttgggactatatgaagtccaactgcctaacatgtctgtagagaacaggaaaacattttgaaaaattcatgaaattttattgtgttggaagtgtgctatgccattaggtcaacttccttctttatggggactttttttcacccttctttttcagatgcttcatatgtccaaaagtcttcagattccttcattggatgcttttaatctcttggaaagaacaaaagaaaaccaggctcagccttaatttggagttttcctttttgccctttgaattgccatgctgctttatgaactattgcctctcctaatcaagaggtctctcatgtttgatttgaatagttataatttgatagtatccaaagctttttctcccatagaaacagaggcaaaacctctttccaatttgacacataccctggtttccattatgaggtcaacacatctgtaaagtgtacagggagatttagtttaacagttttggttttatattatccagtgtctctccaaagttggtgtactcttttcattagcatttagaaattttaaggttaataaagcatgacgcatttgatctctagtggtcactagtaccctttcagttgattaatcatttcttttaaagtgatattagatatttctataacttcttgtcctttaagtttttctggtatacctgtaatatgatttatcccaaaatatgttttaaaaactgttgtattttactaaagattttaatttgtacaggtattcccataatgtccaaaatccctaataagaatattacaggtatacctcatcattctgtagggcaagcagttatagaaagatctaaatgaactctaaaaatatgctaaataaacagaaaggggtagtaaagaccgctagaaatagattttttaacctaatgttagacccaatctttctatcaaacatgggtagctctttctcattgtgataacttgaatatatctgcaatgaactataatccaaaaatggagggcacacttgtaatctgggtcttgaggcaagatgacaacatgccttgaatccagacctccggaggggaacacaaaagtttttttaatcagatatggaggctggaaggcacacccctaatctgggccacaccttctgctggaagcccatataagaacaatgaaagaagaaagagttagttctttgcctgtttgccctaccttgtcaatagattaattccttcactgaaatagaacctatttctttgggattccaacatatacagaagaccagctgggatacccagcctcctgagactgagcagctactagattcttggactttccattcagagaaagatagatagatagatagatagatagatagatagataagatagatagataaatatagataagttctgtgactctagaaaagactaatacattcatagatagatagaaatatatagaaatatatgtagaaatatatatatatatatatatgattcttaattgcaagttacatctttgtcaagtgagccattctatatgaagtttaatataaaataattcattttattttattttttattgactctttgataattgcacataatgtaccctaatctcatctatcacccagtcctccacatccacccaccacccttgtaatgtcaagggaaaactacaaagaaattttgaaaataagttaaatataaaaagaagaaatatattaacacaaacaatacagtaaaaacaaaaacacaaatacaaataagaatatcaatttcaatttaaaaaagcaagcacatcaagcaacaacaaaaaagaccacttttctcctccttctttgcctctccattgtcttttcattattcttagcagcattaggagctgctgtgtattgtgcattacagtgttctgtgcaagctgctattcttgcaaatgttccttgtgtaatgtgttgttagtcaggttcaaggactctggctctctgcacaccatcaaccctggactccaatggaaactccacatatatcccactgttgcccagactcatgcagatcatgtagccatagctctgcagtgatgggggaagtacttctgtgtatgtttatcttattgattgtttaaaaaagttctgtatggccaaatgaaagagcaagttagacaggattaggagtcaaagaggattctgggaaatgtagtagagtaatggtgatccaggctggaagtgacatagcaaggagactcatttttagcaaagagaaagaggaagtcccttgtcccctggcttcttcagcggtgccatgtgagccacaggcaagagtgggcgccaacgaaaggcatcctctaaaagataagtcttataaaatatatagatttatgataattaagactgagctaacagatgagaatcctagtcattggccaagcagctttgaacctaatacaagtctctctgtgcattaatttgggccctaactagggcgggcagctggcataatgcccacgcgtggtggtggggctcaggcggctttagcagaaagatttatcgtaacatttcaggaccagtcctttcattcactccagcaggtaatagatggggtattataggagaaactatggccagcctgccaaagccacagataccctgccctcggtgcccaggccagcttgcatgaacatgtgcattctaggcaggcatttcctccctgagccaagccatcaagcctgactcaatacccagatactactgacagtgagacacctgacccagagacaccaatgaggaaaagacaatgcaatagactcagccacctgagccaataggaccttgggagggggtataaaggcatatctaactaccttaataaacgagtctgcagcacgctctgctaatcactgactcccagtgcctgagttgttggtgctgtgtcttttcacccattcccccaaggggtgtcctagcaaggtaacctgcaaaagggtatatgttcgggtgttccaaatcagagctatggatatgtacctgagtgtctgctgagttgctcagcgctggcctctgggatcatttccttcaggtgattggcagaaacagctttcctaggatcatgatgacaggtaaggccatctttctcaagtgagagaggccaaaagagttccaaacaaaaatgacatgccaggaagtattatcatactcaatttcaaacaatagcacataaatatagtagtaaaacagcaaagtactgacacaaaagcagatacattaatcaatggaataggattggaaaccaagctataagtccacacaacttcagttgtcttgatttctgacaaaggtgccaaaaaatacacatagaataaacaaagttttcagcaaatggtgcttagaaaactggatttcatcaggtaaaaagataaaattagattcttatctctaactgtacagagaagtcaactccaactggatcaatgaccccaacatgagaccttatatcttgaaaccagtagaaggggagaaaaaggcttcaacttgtatacacaggtaaggatgttctgaaaaagattctggcatcacaagaaacaagacaagcatgggaaatgacattcaagtagaggcgagtgtttgtacaagtttgtggagatattatacacttacagcatttgtgttacacattaaaggctgttgatgccagaaagtgaaaggaactgagattatgtaaaggaagatatgaactgtgagatacaattaggcacaatatcatgtaatataggtttatttttgaatttaatattaaagtaagtgtacataataatcactatataatataaaagtctgaatactcatttaaataatctattatttaaaataaaatattttatgagtcacataaaacacacttctattttgtatgtagccatatgttgttttgactacattattctttattataactgggggaaattgctttatttgaagcagtttagtaaaatctcatcacctccttttttctagtatccaaatactgaatttctatgtgttacaagaaaagcagaattatctagtttataattttggatatttaagaatatggcaaagatgatgtctcagcactggagagggcatcattacaatggtgtgctagaaactcagacatcatttggtgaaacgggaagcaagagcatgcagattcaattacctgaaacatctggaactccagttttaacaccatctaacaacctcttttggaatcaggcatacatgtggtgctgcgacataacatacacctaaaaaaaaaaatgccaattgtctccggtgaacattccttggttgactttcccattgctagagcaccatgtcaataaatagaagcatagaactcctaataaataagaaatttatgtaagagaatatgattgtgaattatgtaataaattgtgttgtactgaagctatcttttatttaacattttcgaaatatttaagaatgagttcaaataacttttaaatagatatttaaaaaaaacttgtaagcttgcaaatgataccttctgtggggaagaaaagatgtttacgttatttgtctaaaacactcacatcctagccgggtggtagtagcacatacctttaatcccagaaccttggaggcagaggcaggaggatctctgggagttccaggacaggctccaaagctacacagagaaatcctgtcttgggaataaataaataaataaataaataaataaataaacaaacaaacaaacaaataaataaataaataaataaataaataaaacacatcctttgctaacatcactacacaaagttaatgatggtgtcttaatgcagatagacatcaataccttttatgtactaagatactgtttcctgagttgagggtgtaaagaaaataagcagaataagattactggatagtttcagagcaatagtaagaagttacaagtaaggaaagcaagcagaagagttgatcaataataacaaggagaggatgtgaagtggctctggttacagataaaatgaaaagtggtaaaggaacttcatcagatacaaaacaaacctggcactcacaggatgaatatgtgtgacttcactacacgccagcctgtgtcccttgggaacacctatgaaagatgggggccgggggtgggtgggtggtcacaggcagccaactctcaatggcttagcttggaactctccctcgtaggctagactagctggctaggaagacagatacagctttctctttttccattttaccactactgagaatctgcaggttccatgaatggaacccaggttgttagtctttcactgtcatccctttgacctctttagacatcttgccaggactttttttaaaaattaattttaaaaaatcagacatatatttctgggaaagaatctctcccaaccagaccttttctactgctgctatacaatattaatctacaaaactgcaaagtcaccttgacctaatgaccctcgctagggtcctcctctcatgccttacacattcaagatagcaacacaactttgggcaagtttccagtccacagtcctctgggattatgaataaaatgcaggcttcactcttacatttcataaaatgtcccctcagggactgtttccctctcaggaccttcatgcaggcttaaccttctacacaatcaatggctgccctgtgattctccttaactgtggaggaagattccacaatccctttactcacacccttcatgactctgaagccaggcacagcaaggctggcccattgcatcacatttgtagcagcttttgtttgttgattttgtttttcaggaatggaaattcgtcatacttttcctttctacaacttgtaagcttagctgggtggggactttcttggagaggacctctccctgtattccgttttggatcaagcctcaccttcatctcacctcttttaatacaagccttggctccaacttttaaattttctggtgtttgttttctcttcacaatataattttttaaatttgttttgttctacttgctccttttctttgtagatccgcataagagtgattgctactaatcacatgacagagttgatagtaagctgtctttatattttagcctcagtatagaaattgccacattgttttccaaactaccacaagtgtgatctctagaacagttgcttctgttgttctctctgagacttcctgagctgggctgtcatagcccttatatgttggtccatatataatgagaaacatgagcaccaagtggctcttgagtttagctttctgtactactggacaggaggagagagtccctgctgcataaaagtcccaggttttcaggcccactggccctgtgtggacctttagttactgtagtaagagttcaccatcatcatcttggtgacagtatctgatcctggttccataagtcccagtctctttgcctctacaagtaatagtcatatctcaggttttgttgttttgtcatagttatgaaaataatctggatatgaaattttgtacattatattttctttaataactttgaaatctttactttaaaaatttttagcctgtaaatttcagcaatcaataacacttagtatgggaattcacatttatacatttaacacaaagaagagtagaaccaaatagatatgattattatattactttgaatatggagtggaatatacagacacaatactaagattgttaacactttttggggggttatagcttagcttcagctataaaataccataagtcatattaaacatttttaggagggaagtatgggtaaaatagaaagtaatagatatgaataagagaatatttaaaaaaatctatatgtataaaatataatgagttctattatagttgtatgcttgggaacaaatattaaatgacaaaacttttcttgtattctcatgtatttgcagcatgggtggactctgcttcggtttggactctctactctcccagcagcagctagggcttcatggttttgatgtgtggctggggtacagcggtgacagtaagtatgccaggaaactcatgttcatagacagagattctaatgaattctgggattctcagagtatgtggtgtgaatcacttttactctagttttattttttaactgtttaaaatgttctgtttcatcctaaatttatttaactcagtagagggaatttcactaatatatcaaagtattgaagttttttttaaatattgatagacaaaatttgcttaggattttatatttttaatcttgattagaattaagaaatgaaaataaatgtaaaatattaattcctatataatcttctgcatccaaactagcaattgttttgtcaattcatctaccactttcacaaagtaactctacttttaagtatattccatttataaagtccatatttcacaaacgtaatttcattagtatagacatttgtaaattcccaaaaatttttatttgtcatggttattctatttttctaatcaaaaagggaaggaaaattatgtataattatgttctgccagaaagttccagaaaaatattttgttactctcaattttttaaaatgtcttcccattttcatctttgcacatctaccagatatactgacaacataaaaatgcctttctcaaacacaagtataaaactcgttagccaggtggtggtggtgtacactttcggtcccagcacttgggatgcagaggcaggaggatctctgtgattttgagaccagactggtttacagagcgagttctagaacaggctctaagttactccatctcaaaaaacaaagacaaacaaaaaaacccatctcattgtatttattatgtgaatatgatgtatatgatgtagtatattgtcttacatttctaaggacagaactttgaagtgttgtcaatcactaattgcctaggactctaaataattcttcctcaactctgacaaaaaaaattgtcctgcataaaactgtatcaagttattctgtatacactgaatgaaatggggcttaaaagaaggaaacatggtggagtgtatgcaaaagataattgattaatgctttctcattactgatgtatcacttcagagactttttaaaattcatttattagttccagttagggaagaagcttatttcacatgtaagtcccttctccctctctctcccctcacccccatccctcctcccccactcccagcccacccccaactccatccacccaccactccccaggcagggtagggccctcaatgggggctttgtaaagtccaccaaatattcctgtgctggtcttgggcccttccccatgtgtccagggccagagtgtaacccttcatgtgggatgggctctcaaagtcccttcttgcaccagggaaaaatactaatccaccatcagaggctccctggagtgcagaggcctccttattggcatccatgttcacggggctggatcagtcttgtactggcctcccgacagcatctggggtcgatgtgctctgcctagttcaggccaactgtttctgtgggtttctccgacccagtacagaccccttcgctcttcattcctccctctcttcaactaaattcctgatttcagctcagtttctatctgtggatgtctttctctgcttccatccgccactggatgagggctcaaggatggcataaagagaagtcatcaatctcattttaggggaagggcttttaggttatcctctccaccactacctggattgtcagatcttgtcatccttttaggtctctggagatctccctggttccagatctcttctcagacctatagtggctccctctgatatggtatctctcatcctgctctctgtcctctattcttcccccaactcaatatttctgcccctctatttcctctcctctattcctcttctcttgctcttattgtagcagctccctcccccctacctccatgctcccaattagttcaggagttcatgccacttccattcctggggacgatttatcccttagagtccttcatgtttcctagttttttttttggtgaagaggattataggctggtaatcgtttgctctatgtctaaaattcatatatgagtgagtacataccatgtttgtctttttgtgactgggttacctccctcaggatggtttcttctagttccatccatttgtctgcgaatttcgagattccttgcttttttctgctgagtagtactccattgtgtaaatgtaccacattttctctatccattcttcagttgaggggcatctaggttgcttccaggttctggctattacaaacaatgctgctatgaacatggttgaacataagtccttgttgtatgaacatgcactatttgggttaaacccaagagaggaatggttggatcttgaggtagactgattcccatttttctgagcaaccgccatactgatttccatccagagtggtcttacaagttcatactcccaccaacaatggaggagtgttcctttttctccacatcctctccaggatagattatcattggtatttttgattttagccattctgacaggtgtgaggtggtatctcagagttgttttgagttgcatttttctgatggccaatgattttgagcattttcttaagtgtctttcagccatttcagattcctctgttgagaattctctatttagttctgcaccccgctttttaatttcattgtttggtgttttggtggctaccttcttgagctccttatatattttggaaatcagtcctctgtcacatgtgggattggtgaagatcttttcttattctgtggatggtctttttgtcctacttactgtttcctttgccttgcagaagcttctcagtttcaggaggtcccatttattaattccagacctcaatgtctgtgttactggcataatgttcaggaagcagtctcctgtgccaatttgttcaaggacaattcccactttcccttctagaagattcagtttggctggatttatgctgagatctttgatacatttgcacttaagttttgtgcatggtgacaggtatggatgtatctgcaattttctgcacgtccgattccaattgtaacagcaccatttgttgaagatgctatcttttttccattgtatagatttcacacctttgccaaaaataaggtgtttgtaggtgcgtggtcaatgtcagggttttcaattcgattccattggtctatctgtctatttttgtgccaataccaagctgttttcagaactatggctctatagtagagcttgaagtcggggatggtgatgcctccagaagatcttttattgtaaagagttgttttggctatcctgggttttttatttttccatataaagttgagtattgttctttcaatgtctgtgaaaaactgtgttgggattttgatggggattgcactgaatctgtagattgcttttggcaggattgccatttttactatgttaattctacctatccaagagcatgggagatctttccattttctggtatcttctttaatttctttctttaaagtctcaaagttcttattgtacaggtctttcacttctttggttagtgttatcccaagatattttatgttgcttgtggatattgtgaaaggtgatgtttccctgatttctttctcattggatttatcatctgtatatagtagggctactgattttttttgagttaattttgtatcctgctaccttgctgaaggtgtttatcagctgtaggagttccctggtagagtttttcgggtcactaatgtagactatcatgtcatctgcaaatagtgaaagtttgacttcttcctttccaatttgtatccctttgatccccttttcttgtcttattgctctagctagaacttcaagtacaatattgaagagatatggagagagtggacagccttgtcttgttcctgattttagaggaaacgctttgagtttctctccatttagtttgatgttggctattggtttggtgtatattatcatattgagatatgttcctgttattcctattctctccaagatctttatcatgaagggatgttggcttttgtcaaaggctttttggcatctagtgagatgatcatgtggtttttctttttcagtttgtttatatggtggattacattgatggattttcatatgttgaaccatccttgcatccctgggatgaagcctacttgattatggtggatgaattttctgatatgttcttgaattcaattggccaatattttattgagtattttagcatcaatgttcatgagggatattggtctgtagttctctttcttagtcatatctttgtgtggcttgggtatcaaagtgattgtagcctcgttgaaagagtttggcaatatcccatctgcttctattgtgcttaacagtttgaggagtactggtatcagctcttgtttgaatttctggtagaattctgcagtggagccatctggctctgggctttttttggtagggaggcttttgatgactgcttctatttcattagggggttataggtcaatttaaactgcttatctgttattggtttaattttggtaagtgataactgtctagaaaactgtccatttcttttagtttttcgaattttgtggaatacaggttttcaaagtatgacctgaagattctctggatttcctcagtgtccgttgttatatcccccttttcatttctgattttgttaattatctgctctttctctgcgttttggttagttttgctagaggtttgtctatcttattgatcttctcaaagaaccaactctttgtttcattgattctttgtactgttttcctagtttctactttgttgatttcggccctcaggttgattatttcctggcgtctactcctccttggtgagtttgcttctttttgctctaaagctttcagttgttctgttgattatctaatgtgacttttctccagtttcttcatgtgggcacttaatgctatgaacttccctcttagtactgttttcagagtgtcccataagtttgggtatgttctgtctacattctcattaaattctaggaagtctttaattttttttatttcttcctcaacccaggaatggtacaattgggtgttattcattttccaccagtatgtaggttttctgcaattcatattgctgttgaattctagctgtaatgcatggtgatctgataagatacacgggggttatttcagttcttttgtaactgtggaggtttgctttgctgccaactatgtggtcaattttagagaaggttccatgtggcgctgagaagaaggtatattcttttgtgtttggatggaatgttctatagatatctgttaaacccagttgggtcataacttctgttatccattgtttctttgttaagtttctgcctggtggtcctgtctagtggtgagagcacggtgttgaagtatcctactataagtgtgtgtggttttaagtgtggtttgagctttagtaatgtttcttttacaaatgtggtgccttcatatttggggcatagatgctcaggattgagacttcatcttgatggacttttcctgtgatgagtatgaaatgcccttcttcatctctttggattgttcgtagtttgaagtctaatttgttagatattaggattgcttactagcttgtgtcttgggcccatttgattctgtcttcgtatccattctgttagcttatatctttttatgggtaaattaagaccattgacatttagggatattaatgtctactgtttgttggttcttgtttgttttggatttattgttggcgatgtcattgtgtgtggatttccccctcctgtttctttttgtgtttggtaaaattagattatctattgcctgtgttttttggagtgtagttatgttcgttgggttggagttttccttccagaacctctgtagtactggatgtgtggatatgtattgtttaaatctgtttttgtcatggaatatcttgttttctccatctatagtgattgaaagttttgctgggtacagtagtctgggttgacatccatgctcccttagtgcttgtagggtatctatccaagactttctgcctttcagagtttccattgagaagttgggtgtgattctgattggtttacctatatatgttacttagtcttttttcctttgctgctcttaatattttctctttattctgtagatttggtgttttgattactatgctttggggggactactttttgtggtccagtctctttggtgtcctgtaaactttgtactttcataggcatatgcttccgtaggttggggaagttttcttctatggttttgttgaatatgttttctttacctttgagcagtgtttcttcacattcttctataactattattcttaggtttgaccttttcactgtgtgccatatttcctggatattttgtgttagggattttttggacttgaggttttctttggttgatgaatgtatatcctctagcgagtcttcaatagctgagattctctcttccatctcttgaattctattagttatactcacatctttagttcatgatcgtttatccagcctttccgttgccagcatcgcctcattttttttctttattctgtctatttcagatttcatggtttgaactgtttcaagagattccttcacttttttggttgtttttcttgggtttctttagattctttaagagatttgtttatttcttgaattttttggtttgtcttttcctctatttcgtgtaattgtttgtttgtttgttcttctatttctttgagggattttcttgtttcctctttaaaggtctctatcatcttccttagataatttatgaggtccatctcttttacatgctctgtgttgggcttttcagatcttgctggagtggagtccctagattctggtggtgtcatattggtctttctgttgttgagtgagttcttattctgtcttcttcccttatattcttccagtggatgcaggtggggtctctctatctcatcttgtgacccagtggtgtgtgtgggccaggaattcaatgtccacagctctggatgatcttgcctctcctggtagtctcctcactctgaaggagctaggcctctgtaggggtcaggtcagaaggaagggaaggaatagtggggtgtttgcagactcagggagctcctccctgcctgggcatgtctaccccaagcaggtgcaggccccaggagatcgtggtgaatggagatttggacaggaattgggtaagagcaaaggatcctcacctcgttatggatcaggtcagtggaaagggaaggctcaagtgtgttccttaatggatgtatggatcctgttttcatatccattctgttagtcggggtctttttatcaggatattgaaatcactgatattgagagttaccaataaatagtgttagttctcattattttgttgtgtgagttcctccttctttggaatttcttgtctgatattatttattccttgaactttctatgtatgattaacctctttaggttgtaatatttcttttagccactcaatagtcttagatttatagacagattgcttaaataacttttatcattgaatgtctttccttctacatctatcgtgattgaaagtttttcttggtattgtagtctgactgtggtctttttcccttacactatgcaggacgactgtctaggttcttatgatttttagagtctccattcaatagttacatgttattctaataggtttgcctcatatattgctttcccttgaagcttttaatattttttgttctgtacattttatgttttgattcttatgtaccatggggaattattttcatgtcatcttttaaatattattttacataccaaccacagtttgctcttccttctttcatcccaatccttccactcacctaccccatcttttccttctccatctccacttagaagtgtaagaactcccataggaatcaacaaagcatggaacatcaggctgtggcagtaccaatatcctcaccactacatcaaatctgaacaaggcatctgaccgtagggaatgggtttcaatgagccagctcatgcacaaggaacacattctggtcccactgctggggaaccaataaaagaccaagctacacaattgttcactaagatgcagagggccgaaaattcccaggccagctccctagatgttcatatagagtctgtgagttcccacaagctcaagtcaactgtctttgcaggtttccccatcacaatcttgactacccccacttgttcatatactccatccaccctctattcagctggaatcctagatctcagcctagtgcttggatctctgcatctacttccatcagctactggatgaagactcaatgatagcaagggcagtcactaatctgattacaggggaaagtcaattcagggaccatctccactattgcttggagacttgtctagacttatattgtaggtttggaggagtcttcctggcattaggtttctctgtaaacacacaatggcccacccatcaagataccgcccccagcactgtcccacattatcccacccacaactcaaccatcccgatcccttatatttcctccccatattccctccttctattgtaggggaagctgtagagatgcctgcttaggggctggctaaaggtgtgcctgaccaagccttcgagggcatggtcagggtgacttagagtgagagttggtcaggtggctggtttctggtttcattttcacttttgggttgctgtacagactgctgcctgccggccaggtagcttactctctaagtaaggctttttccctattaaaatcccttgtatttctacctggctccgtattggtaatttcctgctttattctacttctcctgaatacagtttacacagaacatccaatctacttctacttccaatggcaatcaatgtgtcctacttagggtcctccttgttacatagcttctcaggggctgaagattgtagcttggttatctttgctttatatctactatccacttatgagtaagtacatactgtttttgtcattctgagtctgggtttcctcagtcaggatgactttttcctatttctgtcaatttgcctgtgaattttatgatgctgttgttcctacttcctactgagtagtactccattttatagatataccacattttcattatcatttatttggttgaggggcatcaatgttgttctcagattctagatattataaatactgcttctatgcacatagttgagaaattttccttgctgtatggctgagcatccattgggtatatgctctagagtggtgtcactgggtcttgaggtagataaattctcaattttctgagaaaatgccatactgatttccaatgtgactgtacacatttgcactcccaccagcagtggaggagtgttcctttgacttcacatcttctccagcataggctgtcattagcatttttggtcttagcaattctgacaggtgtaagatggtatctcagagtcattttgatttgcattttcctcatgactaaggatattgagcacttctttaaatgtatcccagccatccaaattcttctgttgaaaattctttgtttaaatctgtatctcgtttttaaaaggattatttgcaattttcatgtctagtttcttgagttcttaatatattttggatatcagccccctgacagacatgggcttggtgaagatcttttcccatctgtaggctgccattttgtcttattagaaagggtcctttgcctcatagaagcttttcagattcaggaggtctgacttattaattatggctcagtgcctgtgctactggttttattcatgatgtggtctcctgtgacaatgtgttcaaggctggcccagtttctttggtgttctataagctttttgtaccctgatagccaccacattctttagattggggaatttttcatctgattttgttgaaaatattttctctgcctttgacctgggtttcttctccttcctttattactattattcttagactttgtcctttcacagtatctttaattttctggatttttttgtgctagaatacttttagatttaatattttctttgtctgatgaatccctttctcctattgtgttttcaatgtctgggtttttttcttccatctctgtcttctcttgatgaggcatgcatctgaggttcctcttaaattttccatttccaaatttccttcagtatgcattttctttattgattcatttgttaatcatttattgattctaatttaaggtgctgatatatgatattaagtttgttgggttggcatttttcaccttgctgtctgctgccctcttttgttcttaaaagtgtgtggccatgtatggcctggtagggattctgctagggttgtctactgggtgtcccaggtagaatgtgtttctaagtgttggaagctacacttaggaatagggattgacttggagtagggatgaatcagtcaaggagggaggaaaaaattgtttcaccaggatctcctttgttcccctgggaatgggggcagagaatgaggaaaggccaaggcaggtggtctacagaactgggaatgagactggcagggtttgattttgaggagaggaggtgaatgaacttcagaagacaacatacctgttccctggcctatctgcttccctgttccgtatagccaggaattcccagtgaattacttcaggtataggttgagacaaaggaatgggcttgagaaggagggtgtaggaaaagatttgtgtgatttttggagatgagaatgagactgggcaactgagtttggagaaaaggtatagatagtatctttcccaactggtcccaaaccccttcatcctcaaataaatacacaatgcttctattatttttaaactatttggccgatagctcaggcttcctattggctagctctctttaattattaacccatttttattaaactacatatctccatttagtcttgacctactggagaatgcccagaccttttactcctctagcagctacatggtatctctctggaggctcctctctgtgtcccctcccaagaattctcatctggaatccctgcctatacttcctgcctggatacttattaatcagtgtattattcatcaaccagtaagacaaacatatatacagaagggcatcccccaatggaaaggggatagtgggaagatctggagactgcttctaagtacttaatctttgtatgtacctaatgggaagcatgcttaaaagcatatatatatatatatatatatatatatatatatatataacatttgcatgctgaaaatgtacattttgggatttttgaatagaaaagaaaggaaactttgaatcttcaaacattaaagacttacagtagtagaactttgcatgaccatacacatgagaggcaaggatagagacagacagacagacagacagacagacagactcagacacacacacacacacacacacacacagagagagagagagagagagagagagagagagagagagagagagagagaacaggaaaagcaaataggtggtttataataccagctatgaaggactagaactgctttcatcttcaagtactgatggtcactcagaggttgaaaaccttcccaaaatactgtatacagctttaattttaatagaatttcattgggtatatgtaaatatttacaaatgaaacacatggtttgatttaatttaatactgattgtaaaagtcaatacccaagatttgtatctatggcttatagaaattgggggaaatgtgacaccatgcccagaaggaactaataatgttataaactttctgaaattcattaagacataaaatcagtgagctcctgattttttctggattcacacatttcttccaaatatattaaatattagcaacaaatgaatggaatatttcacagtagtaaatggtttaagctttttttacaatgtagaatactagatggaaatatagcagtatatggaaataataagagtggaacagtttcactgccctggttggagcctcctgaggcctggggactgcacacaggggactaatgttgggaaatcagttcatccagagtctgccagtatcatggtaatagtcctgcttccacccacaggaggacataagcatgggcctgtttctggcccaacctctagtgcccatattggagcctccagagggtctgtgtacaggggattctattcttgcagagcagcccatccagagtctgccaacatccaatggaaaggtcaatatgacaccaccagaatctagggactcaacaccaacaagacctaaacatatcaacacagatgaagcagaagagaatgaaactataaacaactttatgaagatgatagagaccctcaaagaggtaaggagaaaatcccttaaagaaatggaaataaaacaaacaaaaaattcaagaaatgaaggaaaagtctaaccaaaaattgcaagaaataaacaaatctcttaaagaaaacaaggaatgccatgtaaaaacaacctttctctggggaaccacgtatgtctctcttagaaaggacatagtcagcaaggcaaaacggcagcccacagaatgataaaagatattcaccaatcccatatctgacaaagggctgatctccaaaatttacaaagaactcaagaagctattgtccaaaacaccaaataatcaaattaaaaagtggggtacagaaataagtagagaattctcaatagagaagtctaaaatggcttaaagacacataagaaagtgctcagcatccttagccatcagggaaatgtaaatcaaaacaacactgtgataccatcttactcctgtcagaatggctaaaatcaaaaacaccaatgacagtttatgcaggaaaggatgtggagaaaggggaacattcctccacagctggtgggaatgacaacttgtacagctactttcaaaatcagtatggtggttcctcaggacaattggaaccagtttgccacaagatgtatcaattccactcttaggcatatacccaaataatgcacattcatacagcaaggacatctgttcaactattttcatagcagcattatttgtaatagccagaacctgaaagcaaactatatgcccctcaactgaagactggatagataaaatgtggtgcatttacacaatggagtactactcagcagaaaaaaataaaaaacaatggaatcttgaaagtcgcaggcaaatgcatggcactagaagatctataaggatgacaccaattgtcaatctaagcaatggtggagaggctaccttaaatgcccttccccgataatgaaattgatgactacattatatgtcaccatagagccttcatccagtagctgatgtaagcagaagtagacacccacagctaaacagtgtactgaactcctggaatccagttgcaaagagggatgagtgcagagcaaaggggtcaagaccaagctggtgaaacctacagaaacagctgacctgaacaaggaggaactcatggactccagactaatggttgggaggctagcatggaacttatccaggccttcctgaatgtgggtgtcagtgagaagtcctcagtaatatatgggacctctgatagtagatcagtatttgtcactggtgtgtgaagggacaggagggatgctcctttgcctagtcacatggggggaaggcctagtccctaccccagatgatatgatagaattggcattcctccatagagggcctcaccctccctgggttgtggagggtagatggtgtggggttggtggggtgctggggatggagagggagctggaattgacatgtgaagcaggcttgcttctaatttaaatgaaaattaaaaacaaactcttacatcatttgcttatttcactatacaaaatttatgatgtttctggataaaatcatgaatagcttcttaaacatcaaagaaatatacctatatcaaagcactgtaatttgtggaggaagaaaggagtggaagacatttggtgatagtaaaacagaaaggagaaagggttcagagaaagacaggaagaagagaaggaaagagacccatttcagggaaggcacaacagtatttaatatgtatggattgaatatattgcttattcccaaacagcaagcatagggaagtggaatacctttccagctgttaatagactgtgaaatcctccatgtttttttaaacaacaaacttatcttattaatacaagagttcatgggtaccattaaattagaattaagaatatctgaattttcctgtgttggactcagctcaatgtggaaatgaaaagaaattacaatttaagaatgtagggactccatttaaaaatttctctgaagaaatcccaaaacaccatggtttatggcattcaatgaatatgttctcaatattacaataccatgtgtgattatcagatgtggactaagaagctgtggaaatctgaatcttttcaattgaatttagacaatctttctcaaacaggccactggtggaagttgaaccaaaggtcttgccagtggaagaatttaaaaaaaatgaagcagagagggaaggtcataccctgccaacttgaatgttgtgtgaagccataatgttttttatagtttgacataagtgatatttattctagtctgtgtcagttgaacacaaggaaataagcattcctaggtttcccttcaggctgcatgagacataaactacaggtgtctcatagcacatcttgttattcagaactaaaaaaatctccaggagttgataaaaaggaatccgcactcctttcagggcgattgcctccatcaaactgggttgtgggtatgtctgtggaggcattttcattcttctcttttattaaaggcttctaataaaatatattttatcatattttcctctttcccagttcctcccagatcttcactaccccctgcctaccagctttatattacttctttcttcctctcttaaaaaagcaagaaaaagcccagaccaaaggaaatataagcaaccaaggtgaaaaaccaataagaaaaaaaaatgcccaacgtcaaacaaaagtccattaaaatgccattgagagagagcctatttctaaacctttgttgtgaaattacaaaaatttccatcttaacaattccaggattcaaatttcccaccatttgtttctgtatttagatttgcacatccttgatatatattcgagcaatgtccatcttgttcagcagtcactttcctgtggttcctgcatgcctattttatagagcataaagtcaaacagtccagacaagagccatttttgcccaaatggttagtctagccatattggaagcaaactctataacaactttctttaatgtctttccttctttctgacgtaattggtgtgccaggagcagttgtgtctcactgtcatgaaaaaccttaaaccattttaaatgccatatattctgtagatctttgaaaggtttgaagactatctattcatctcaaatatatctctgcatatctataaaacctaattaacctaactgtaagttttgactattattggtaactatctataatttgtatataattatacattacattttaaaatgagctatacaaacaaaatacctaaacaagaggagaaatatatatatcacaaaattgaccttaagtttgtatcaataactgaaaatccatttcaagacaaattattcatttctatacgataatacctctttacctttaaaaagagattgggtgtgatcattaatcatttataaccaaccccatttaaatgaaaacaaaaatttataaacaatatttgggaatctgggcattgttcattccaaactgcttcctgctggttgggggcgatgtccataccatggcgatcatgacaaaacatagaaatctggccaggtccttgttttttagtctacaaggctgcatcatcttagctgttttagatgttggagctcctgggacactgtttcagggggtcttgattcatcaaaccatactagtcagaaggaatccatagctttccattttctgtggaaacacaagcaaaacctcttttcccaagtaatctgtccttatatttaaatttagaagtcaaagcattttcaaaatatataagttggattatttagcagcaactatgatcaaatgtattttagcagctgtagctcttggcaatcaaacactataacatatagtatccagactctctgagtatttcccatctttttattacctggctttttattattctattacttttactttttttgagacagagtttctctgtggaaatttgtttgcctcttcctctggagtgctaggattaaaagcgtgtgtcagtataccatctactcattattttttttcttttctctcccaaagctatatatattgttctttactgtacatctgtatctttttctactcatatgagtctcatgtgctccctaacagccacagctttggctccttagaaaaaaacaatcaggaagctgctcttaaaaggagtagaggcatgtctctcaatgcctagaaaatagagctcttccatgaaaatgcagctaccaagaagctgtgctttactctcttctttttgtttctaaatctctctttaagtttttgtgaagtttttatgtggaagttcttagtacccatgttgatggtgacataatgtttcaggattcacacctgggacccatcaaataatcacacagagcccccaaataatcacacagatgctatattaatcatgacagagaatctcactccatcaaagaatttgcagattcagcttgctctaaggattttatgtctcagcctgctaaccactgaataattggtggtaatcattcccattctgcatttgtgcagaacttggatatctaatgctagtcctcatgcttatgagaagactgtcttccctggtgaggagcatctccccagccacagttgtagtcctttgaaagtactctctccctccctccctctctctctctctctctctctctctctctctctctctctctctctctctgtctctctctctcttttgttctatttacatatgtgtgcatgtttgtatagttatataagcccatatgtatacatacatggtgataggggagaataacctccagtgtcaatcctaaagtaccttcctgccttcttctcaagacatgttttcaatagtctcacctggaacttttcctgataggttagactagctggctaggaagcttcaatagacatagctgtctctctttaattttaccactactaagattctgcaggttccaggcatgggactcaggttgttagtctttcactgtaagccctttgacatgttgagccaccttgccagtccttcatttcaaatattaaataaaaaataagacaaatatttctgtgaaaagaatccctcccaaccagacatgatctactgtttctttacagtattaacccacaaaacagcaaagtcaccttgatctaatgaccctcactagggtcctcctctcatgccttacacattcaagatagcaacgcaactctgggcaagtttccagtccacagtcctctgggattatgaataaaatccaggcttcactcttacagctgcatataatgtcccctcagggcctgtttccctctcaggaccttcatgcaggcctaatcttctacacaatcaatggctgccctctgtgattctccttaactgtggaggaagattccacaatccctttactcatacccttcatgactctgaagccaggcacagcaaggctggcccattgcatcacatttgtagcagcttttgtttgttgttgttttttagaaatggaaattcctcatacctttcctttccacacattgtaagcatagcttggtggggtctttctctgaatggaactttccctttgttccattttgtatcagactcaccttaatctcatgtcttttaataggagccttgacttcaacattaaatttcctggtgtttgttttctctttgcaatgtattttttgtatttcattttgttccacttgctccttttcattttagacctgcatgagagtgatcgctagtaaccacataatagtaagctgtctttaaatgtcttctgctaaggatattgcttcactactttctgtttagcctcagtacagaaagtagctgcattcttttccaaactaccacaagtattatctctcacacagttactaatattgttctctctgagactttttgaactgggctgccttagtccccatatattgatccatatgatgagaaacatgagcacaaactggctcttgaatttatctttctgtactgaaccggaagtcagagttcctttctgcataaaagtcccagatctttcaggtccattggctctatgtggacctttagttactacagtaagagttcaccatcatcatattggtgagagcagctgatcctagttccataggtcccaaactcttggcctctactagtaatattgacatcccaggttttgttgtttctctaatagttacaaaaataatctctatatgatttttgtacattgtactgttcttttaaagctttgaaaactttaaaaaaaattagcaagtaaatttcagaaatcaagaacacttagtatgagaattcatgtttattcccatagcacaaggaagagtagaacaaaatagatataatgattatattactttgaatatgaggtggaatatacagacacaagggtaagattgttaacagagccttttggattataacttaatttcagctatataataggataagtcacattaaacatttcttaggaaggaagcaggggtaaaagagtaaataatagatatgaatatgagaatatttcaaacatatatatgcataaaatacaataatgagctctattagctatatgcttagtagcatataacaaatagcaaatccttttctttcagccacacagcttaactgcttaaaaacttttgtttcatcctacatttattaaaatcagctgaggacatttcacttacacatcaaagaattgaatagtttttttaaacattgatagacaaaatctgcttatgattttatattttaaatataatttaattagaattaagagatgaaaataaatggctcccaaagggaatggcacaattgggaggtatcgccttgttggggtaggtgtggtttgttggaagaagtgtatcattgtgaggtgggctttgaggttcatatttgcttaagccaagtccattgagacagttcatttcctgttgcctttggatcaagatgtagaattcttcagttccatgtctgccagcacaacctcatgcccgcccccatgatgataatggactaaatttctgaaaatgtaagccaccacctcaattaaatattgtcctttatatgagttgccatagccacggtgtctcttcacagcaacagaaacacaaatataagggctctttctttagtttgggaaatttcctactttgattctatgaaatatcttttctatgccattgacctggacttcttctccttcatgtatacctttaattcaaagaccataatgtaagccccgtaactctaaaactactagaggaaaacatgaagaaagaaagcttcaaagtgcaggtacagacagtagcttcctcaagatgatgaaggtcacccagtaaagagcaatgagaatagacaaatgggattgagtaaagcttcaatgctccagcacagcaaagggtggaaggatggaggaagctgatgccagaccagcaccaaacgaagatacgttccggaatcgaaagaacctagaaaattccacagcagaatgagtgatcccatcagtgcttgggcaaacctatagtgagagatccaaccagccttcactgtggcgctgaccacgctcatttgggcatggccacaggtgcgtacataagcatatgggatttggtctggagtcctggacaggcttgctctcttggttccagtcgggtcacgaagttcagctgggcattgatcctcggagagagaacttgtgggatatcggtttctcatgtaagtgacttctccccaaataaaattaacctatattgatacaagtcccgtgtgtcttaatgtgtgcatctgcacaaaccaacagcacagacttttaaaaaggagcacaaaatccacaatgtgcatgaaatagcattcaacatcattggccctcaaatacgtaaatgaaaacaaccaaagattccatcttgctcattcagaaaatctgtcgtcaaggagaaaaatgcaatatctgacaaggaataattattgagatgttgagaatcaacaaaactaagaaaataatatcaaatgaaacaatatgcaaaactgagtcatatggtacgcatctcaagacaacagtaagtggcatttccttaaactctgaaaaaaactctataaaagaaaacaagccagttgccggcaaggtctctggggagaaaggaattctgtctcctgcacctgggtagatttagagatcacggcaaaccgttagtgtgtgtggcctgaaagcttcccaggccttccctctcattgcgttaacagcaaaacaaaccaacaaaaacaccatttggatctcttttaacagctcttaccctttttgtagtagtggctcaataaacagatggtttttgttttttgtctttttttgtgagggactcttttttaaagatatatcctcctcatgtatccctgaaggccagaagagggcaccagatctcgttaaagatggttatgagccaccatgtggttgctgggaaatgaactcaggacctctggaagagcagccggtgctcttaacctctgagctatctctccagcctctaaacatatgtttttaaatgtcctataatcacataattatccaaggaaaatacaattttagctaaatatgttatgttctatgtttaagggttggcagaagaagcctgaatccttcatgtatttggctatcaagctgagaagactgatgagggcaacttggagttctggggatctgaacccaagcttgtagtttggcaaaactgctgccttgtttccagtggccacacagggacctagtgatgctgtcatccatatgtcttcccactttccttggaccaccaagcttagaaatgaccattaaggaactttctggattatgatactatccttatttcttggattcaagtcaccgcatccctaagagcttgcagcctttgataccacttctcaaaatgagaagcactgagtgatcaaggaagttcatgctaaatgcttcttaacccttcacccttcattagttcactgccacagtcgtctctctcctctctctctctctctctctctctctctctctctctctctctctctctctccctctctctctctctttctgtgtgtgtgtgtgtgtgtgtgtgtatgtgtgtagattatgaaggtatatttcacagcatattatctcctgtgtcatattatctcctatatatattttatattatgtctttaaagtaattctttgagactatatagggataacacaaaattaaattttgataaattagcagattggccttaagtctttctctttttcattatattaagactatcatagtttactaactgaaaggtctttaaaatcccttatgtttttaaggcagttgtccctatgcattcattctcattgggctgttcacttcccaccagaatgtagcagaacagaaaagatattgggcaaactcctatattctccaaccatgtctttgttacagtgtgctattaatagaagtattttttaaatgtcagcacattattctagagtcatctgactttgtttgctctggatttatctcaacatggaatagaacaaatcaattaaatcttgaagaagtcttttgttttgtaccataggtgatgataccttggttagcatctctcagaaagaacaaaaaatatagcatggttgggcctattctttgttttgttatgccaatctgtagtaattgagtatggattccaaaaaagctggatgagaccatgtgctctttcagaacaagatgaagttgtctcatgatgctattgaagaaacaattggcagggctgttgacagtataagcataaaacaagagagggggaggaataagaagaaacctgccaatttgaaagtctggttaaccaaacacacaccattcaacaagattaagactaatgtgcatatgactgatactgcacatgtccttgaggacatcttgtttatgggtggctgaaaaatgtttcctgagcccatcagagaatcttgatgattttatttcaagaattttcatctcccaagtttcagtgttcagaaatgaagacaggaatgcaaccagaataaaagactagaggctctgggaaccatggagcccatgatgcctgagaatgcatttgacttcactattcatctggacaaagatgcccttggcttggtgtgtgaatagaggataaaaaactgcttagctagtagttagaaacattgagttttctacctcacccagaaaacactgttgacatctgtgcttagaacatggtgggttataagttcattgaagtttgaaaagggattccctacataccccatctttctcttacccttttgtatgaaagtcttggcaaaatatctggaaagcacatgtttcctgagagatgaaaatctccagtgtgtcccactcaagagctctgtttgtggaaatcaaagacctagactttactgtgtctgtccaaggcactaaaatatataaggggtgtggtctattattttgctttatttttatttttcctttattcttgagattataataaaatacattacttcttcactcctttccaacctccaaacccacctatatcaatctcttttctcccttttaattcatagcctctatttcattaatgactgttaaacacatacacatatgcacacacacagtggttgattggttggttggttggttggtttttggcttttgttttgcaattctgggaagggattgacaatagagtgactttcatgctgagaagcaacccaggtgatggtagttcatactagggttctaaggaaagtcagacaaaaaaacatacaagcaagagacacaagccggctggatattataatcaaaatctgaccaaggaattcattaattcatgatgggataaatctacccaagattgtagaatcctgatgacctaagcatcttgtacatgtgccacttcttaatatgtcacaatgtggacaaaattcaacatgaattttggtatagacctttaattacagacaccaaatcttgaatccaagaaaactcaataaaacacctaagaaggtcagaaaatcattcagataaaattagaaaaatagtcttaagtattaaaagaagaaatatgagtttaaactaattatgcattgatttcaaattagtgtatatgtactataatatataaaaatattttatatgtgctttaacataagtttaatgaatatgagaaaccttggatacagttgatattgtgatagtatttgttctagtagataaaatgcattttttatgctccacagtactaaaagtcatatgcatgtatattctgagcattgccagctataatctttcctatatatatttctatttgaccaaaggaacgtaaaaggcaatggtgtcagagtcgagtggatcacctgagggaaaataaataaaggagtatcttaccagatctgttcacactgcccatcaagaagatcaggaataaagcatggctgtaggttaattttatgatatacatttgagtagataggaggtgttactaagaccactcaaaaaagagaagtagtgctacaagccacaatatcacacagtaattatacagctgtcatgtctcaagataactcagatgaataagaattcttctgatggataaaccaatacaaaagttgtacttggaattataatcctgtgaatgaattggctgtttcttgctgcacatttttcctgtagtttatattttctctgtaacaatcttgggatttacttctcagagttcagcactatctgatcatttactgggaacaaatttctctcatgcatttggagttttgcttattgcactctctagctttgtgtaaaacctgttctcaattaacaggtcctagtttactgactacattctttagctatgtgtgagacctgtttcccactatcaggtccttgttcccatctccattgcaattgcaaagatctaccgtcctgcaatttacatttattgacaggcatttggtcagtgtttaggcgccaggcaaaagtatgacatctaatacagtcctagatatccaaagacatagacaaaggcccacaattgttgattcatagctgcctagttgtatagaaaaactaagcatgccctgattttacctcactggcagatagagaagcaataacctaaactaacactgcactcaaagattctcaaatttcttgttttattaactcaatatcttagctcagagatttaatgctccctcctgtttccctgagaagataaagacaaaggtaatcagcccatttgctcatcctaagggaaaagtaaactttcctgaatacctttgctgccactgtgtccagagtactggaagagccaggttctattttttgtgcaaattaaacttagaccctctctttggcctacagccctaagcaattgatgctaaaagattctcctagcagttttatgttattgctctgtgtgtatcttaatctgccttgttgaccctgagaaactcaagcctcatgttgtattacaagaagaagaagaagaagaagaagaagaagaagaagaagaagaagaagaagaagaagaagaagaagaagaagaagaagaatgctcagcttttgagagttgttctccctgtttctctttgagtgatcagcagagaaaatgttcatctgggagacaggggattacccaggacccagagtctccttctaccatatattgaactctaataatcggtacattttagatcacaggtagttagtagagaaaaataacactgtctagtcatcttagtcatcattttgctttgagaagaatcatatttggatagggcacttttctcctgagatgaatttatcagagccctgaaccactgtatttattgatgtagaaatgactacaagatacttgagggaatacattaaaagaagagagaggactggacatggagaaagaggagaaaatggaattacataacccagggtgaagtttttatctaagtctgtttttcattaattggatctcacagacagactaacatatgaagcaagaagttttatcctttcaaggtttataggccaggagttcataggtcagatatttttattttattttatttttttctttgttcatgtttttgccagtgggtaaggactctaaagagaggcagcacaaacaccccacagtaagcagagtgtttgcaaggaacagatccaattgagatcattgtgacagacctgtgcacagtaaaactaatcattaacccacaaattcgtgaattcattaacccattcactagtcacctcttaaatgccccagctccaaatacctcacagtgtgaattaggtgaaaacatggatgttgataagcgatgtaacccttagcaaatggtggactaaatgtctgagcccagaaaatacatagaaaaaacataaaattatgtctagactaccagagataacctaaattagtataatgtaaaacaataataaatcatatttacagtaataaccttatttccataaaatatggcctctgctgtaaattaaatacaagaaatttaaatttcttttatgtccatttttccctgtacctgaattctgaccctgaccctgcatattgttttgaagacactaaaccttgtctacagtttgataaatttaagttttacatatatcaatctacatttatcattgttataagaaaggcaacattcacctgtaccacacattgcctttattatgcttaactaatttttaaaaaacattggattggaagtctaaccttgactgaaggcacatgggaaattttatttcaatatgctgtgttccttatattttccattattcttatctctgttgtccaaaactcctggcttcacttctgttgatgcataatcccaaagaggcatgattggcaggatatttcattcctcaaagggttctttcgaacatatataaaacttccctagatattgataaacttttgtatgttaaactttcattttggaagacaatgttggtaagtttgcatagtcaaaaggattatttatactgcaatgaatttgtcttccaactttcaggatcaatactgatgtggtaaactagatcttacataaactgtgcattctttccaacttggtattttctggaaataaatttctattataccctgtgactttggacatcaaccacaagcacatgggccttggggcacaggtcactttcaaacagtagcatatgcatttcctccaatcaatgcgccagatttttttctaggaacatagggatacaaatttctgaggtagagaatttacaactaattttttcttgatgatgatactttacttactctcttatagggaatgtatgagcttgagatttttgcataatttttggtgactatggtttgtttttttcctattgaaatttttatatattcctgagtgtttcaaaccattcttgcttttaacgctttgccactttcatattctgaataaatcaactcccattgttcacttaagtcagatacagggggaaatgtttttaaaatgtcattgtttgtaatgttaatgtttatgatgacattatataactttgtatagtgcagctttcaaactgattcagtaaagattacagttttgaggaaaaacagcacaatgaattattatccaacctagaagctaaagaaaacttcagcatttacactaaggatgaggacaagagaagggtgttggcatgctatggtcccagagctaaggaaactcgctagattcaggactatagctctgtaatagagattgaagtcagggatggtgatgcctctggaagttcctttattgtacagggttgttttggctatcctgggtcttttgtttcttcatataaaattgagtgttctttcaaggtctgtgaagaattgtgctggtattttgatggggattgcattgaatctgtagattgcttttggcaagattgccatttttactatgttgatcccatctacccaaaagcatgggagatttttccattttttggtatcttctttaatttctttctttaaagactcaaagttcttgctatacaggtctttcattactttggtcagtgttaccccaagatattttatgttgtttgtggctattgtaaagggtgatgtttctctgatttctttctcaccaggctggtgaaacccacagaaacagccgacctgaacaaggaggaactcttggtccccagactgatcactggaaaaccagcatggaactgatccagaccccatgaatgtgtgtgtcagtgtggaggcctcagaaatctatggggcctcttgtagtaaatcagtacttatccctagcataggaatggactttgggagcccatttcacatagagggatactcccgcagcctagacacacaggagggcctagcccctatccaaaaggatatgacagaccttgaagacgccccatggaaggcctcaccctccctggggaacagaattggtatgggataggtagagtgttagtggggggcaggggaggaggagagggagagggaactgtgattgacatgtaaaacaattttgtttctaatttaaataaaaatggagaaaaaagaaacgataggcattattgaggaaacaaaagaaacttgctggaggttttggaactatgtcaaatttgagatctttgcttttttttgacttctgatttgtcaaacacctatgttcatggttaaagtaggctctgcccttctttaggaaagatcatccaaaaaatacattcattgttacatttatggtgagcaagatggaaaaggtcagactacaggaataaaacagttggtatggcactctaaaatgtgtgtattgttttgctttacattcagtattaaaacagcaagagatgaagttatttagaccttggatgcaacatgaatgttgaaagatacagctttattttattgctaaaattattgtgttgtgtacagttcctttttccagcttatttggcatcttgatgttagggaactaaacaaaaaattaaaaagagccgggtggtggtggcaaatgcctttaatcccaggacttgggagtgagaaacaggtggagttctgtgagttctaggccaacctggtctacaaagctacacagagaaaccctttcctgaaaaaaaataaaaagaaagatcagaagccacatcctgtgcttgggacagaaacatggacattatatgtggagaacatctcttctacagcaacctgaattaacaagcatatgattattcaaattgtgttacagaatatcactttaaattgatatttacacagggtgggagacagatgcttattgttcattcttgcattttttagaatcacatattctagaaattcttggcacattggtgaaatatgtgtagtgtccatagttatgaaaggagcctagggtagatacaatggccagacaagatgcactggtactcatagcttctacatatgaaagttcattcactccgattctttttatccatctgtgctatacattttattaacccttcctactgtcttcattctgctgtcaaaaatcttacgtgctttgaactaattaacttctttaaagtcattgacaaataaattatatactaaccttggtctttcaggataaattccagagacatcagtggtatttattagcaaacaagtcaaggttgtatttttacgaacagctaagttaaagaaacataacttttataattagtattgtcaattttaatttcatctaagctgttctttgaaaagtatagagtttatctaagactcatgtaatatgaaaactttcggttacagaaggttacatatggacataatttatgtgctataagttgacttattactcttctgttagccacttcatgacaataactatttccctgcaggtttaaaatgtggtggctgctgagtacaatatactttgtccatatttgtggaaatatattttatttgccacaaccatgaatcatgaagttcacatgaataagctattcttatcactaataaaaccacaagcatttgtattatatctgttaactacattaatcttttctggatctcttaaagtctgaatgtttaccaagattgatgacctcattccaagaaaaaattattttttaagaatcaggaaaaatgactgagaataaaatgatcatgatttttctctcccagagtgaaattattatccactgaggttatacaaatgaagagtatgaggctgtgactgaggatggttacatcctcccaattaactgtaatcctcatgggaaaaacaacacgaatagcacaggtaagatctgagtaagacaagtattgaagcatcctgtggcaatgcaagcattgccttcaaattgagtaatttcaaaagagcaattgaagctccttgacatacatagctaaagttggggaattaaatgtacctgaattctattggctctttgaagactgagatcctgtagaaatggctctacttttgcacagtgaatattgataataagtggaatgcagtcttagcacatccctgttccctcatttcaaaatcttttcaattccattgtgactatttgagatttgttgatttcattttaaatagatgctaatattgtgaaaacattttcattgttgtttggcagccacaaagaaagtagtactttgtcagcctggcttgtttgcaactcctggtgtgtgggtttccaatcctcccaacaacagcctggccttcatattagcagatgctggttatgatgtgtggatggggaacagcagaggaagtacctgggcaaaaaaaaaaaaattgtacctggacccaaactctaaagaatcctggggtttaggtaggaaaaaagctccatacaacactacttttgccttaagagaatgtcatatattttaatggtaaaataaaggtgtgggagtggattggagcatttcacttggaatgatattttagatggatttgagtgacatagtttaggactttgcattgtggttactatgcttaataattatgataaaattctcattatgcttcttatttctattcttgaaatacattttcttctaatcaatccacttaccttaacaattatacgcctctctctcattctcgtgtgtgtgtgtgtgtgtgtgtgtgtgtgtgtgtgtgtgtgttgttcctcatatggcattgtacatgtggaagattggtgtgtcaactctgcttagaagaagtttcttgagtctggctccactgatctcttaagttgtcttcacttggtcatttctcaacaccatttactgtcattgtttgagtttatacatagtacatgtttttaaagaaaattgtttttttttctctagttctgtccacttgcctgcaaattttcataatgtcattgtctggtgcatgagctagcatgttgggaccaattccctatgagacggtgccatgttcagccttaacacagcagggaggagctttttcctaccccaacttaatatgtcagacttggtcaactccccatgggagcccttacatattggaaggaatggatggagggtggactggagggaaatcaggaggagaggtggaagggagaacattggtatggaatgtaaaatgaaattacaaaataagtaagtactttttttaagtaccgaaggatataggtctgactgccaggaaaaaatatttctaactaatgcatgtatatgttaatttggaatgtgataggtagatgagtaatagacagatacattgattatagataggtaagtggatagatttgtatgtatgtgctcacctgcaggtgtaggctggagatgatgcagtaggttgggtgtcttctccaagagttaatttttcagaaatactgagctgatccttaagtacaatcaatctggcaactcaaaacatccagcagtcaataaatcataaaaagagtcattcacaacaaactgaatgaaatttaaatgttttaaagtcatagcactctggtaagaaaattaagggaaatctccaaggcaaattttaaatgcctgacaaaacacaggcataagatctgtaaatcagcctaaccacacagataattttgagaagaaaggaaaggcagaaaattaatctgttatttatttcagctcagggggcattttctacaaatcaacaactggctgaaaagattaaattgtgttttttattggctcctgtttgaaccgttaaatatgtcaaaggtattttgtgccttctatcttacttccatccaatggcttacaaggtttgtgatgaacttaaagtgtgggtatacttacagttttcaaaataacttgttaaagaggagatctgcctgtacaatccagtgctgattcacttacatgaatagcctcccttgattggctacctcaaagttgaagagtctgaattttgtcttatgtattttcttaagcatgattgtatttttctttactctatagctgctacttactaatttaacttttcactttcaagaatttcatatattagtacagtacacacatcattttcatccttccctatactctcccatggccctttccctctagaactcatgacctcctctgtaactgttatcattacacacatatgtacataccttctaagtccattcagtgttccttgtatgtatgtacatatgtttagggctgaattctctgtattggatgatcttttgaatgtttcctattgcaatttatcttatcttgtatttcactttaaagttttctatcactctcttcttaaaattgtcacactaaatttcattagttgtacgttttcttttacactaaccttcaacttgccagtgtatacactaacttaacttcattatttttgatataattattttttcttatggagatactgccataatattgtagaactgataggatatgtgttgattaaagacaaataaaatcactacaagtatcaacatttaaggtgactgcagatttcactctgtcagtttggatttcatcttatgacactatcaggattccaaggttgtctaagatattggttgccacaatcaaagtatgatggtaaaatttctgtacatccttgccatcacattaggttcttaaatactcttcactctctgcttcgtttagagtaccaaactgtggtttcatttgcatttacttgtgactatagatagggcatatttttcaattgtatccttccacttgtgcaatcaacatccctttattactgaagatgtcattaatttcttgtttatatttccaaatatcttaaataattgaacctgtgggttctcttgaaaatattcattttattttagaaaggttaatccatacatgtaaatgcagaacaaacagaactattgtgaattcatggccatcctgagctatataggtagtacatggcaggcataggaaacacaacaaaactcttaataaatatagaaaagaaaaataaccttagaagcaagtaccctctttaccttatttgtaactctcatgggcttttagggttctaagaggctagttaggcattgaatgttatgaagaactttgtagtcctggatatcagctattgtggatcacctagatttgttctagtgcagagcatacatcacagtttaaattagcatcttaattttatcaaacacacaagaagaacaaacaaacaatttgtttattgtctctgtcttccatcttcccaaaccagattgactgataactccaattaaggttttgtttaaatttatttctgttatttgttggcatattcaatggtgtgtgtgtgtgtgtgtgtgtgttcctattcctgtaacttttctcagcataatgatgaatttggtctacttcattttatctttttgtggattcatttaattttgacatacaggatacatttctcttttcctctaatcaattagaccactccgtaatgtatacaatatattggttataaccactgcattataccctcttagccatcctcctcactctgaattccactgtcttaccaattcaacccctctgcttccataatctcttttttgattcattgagcctagttgggtttctttcatgaacatgcaaaggggctgtgtgatgatagcctatccatccctgaaatagcccctttcctggtcacagatttattaagttgtcttttctatttaaaaattttcttgtattttattagattggcaatcagttgcagaatgaatgttcatagaatcagcaaaagaaaatattctattatacactgaggtttaatacatttatctacaaagtatttaatacatttatctacaaactatacagacatatagtttcatagtctaaggatattaatttctattgctagttgtctataataaatagtagatattgctgagtgctttctatatacaccaagatcctgcatttctttttaatctgttaacatggtaatttaccaattttctgagaattaagctaacattcactccagggaaaaacctctttttaccagaccaggcaggacagcttgcttgccatttaaaaatctttaacatttacatttattctcttgttgattttattattgagacagggtttcatatatcttaggttggccttgaacttgctgtgcagctgaggataactttgaactgttcttgatcctccttcctgtatttctaaagcaatggaattttggatgtgtgttagtcattatgtcagttttattcagtgctaggaaccaagtcaactgagctacacaactagctgccatcttcatttctgtgaaatattggttgtgtttccttttctctctaaagttagggttagaataaagccagcctcataaaaatagtagggtttattttacctatcatgtgagtatgaaattttcctacctggaagcttgattataagataattttttaaaaggacataagactacttagattatccacttttaaatgattaaacagacaatttgcctaaattctgtggccctattttatttgtgtcactgattttattaccactactagaatccccctactagtctactaattgttacagattgctaaaatatatggttacagaagtttaattttactctgtaggctagtccagtctaatcactacaaaaaacatttaattattgtgcttcttggagacaggcttatctcagaacttttagtgctctcaagtctttcctgtggttaattccctggccttgaattcctttcctgaaatagatgtgcagtccatagttagctgaaaagtagaatctgtgtagaactttaaatactatgtccttctcctctgatggaaaccttagctacctttcagctcacgaagattgcctagcctggaatctgccttgggcaacaaggggcctatgtagatcactgtatttattagattcatatttttcacatattaccatctctcacagtctaatactcattggtatagaacacttattttttaggtattttgtgtgtattttcaacaaatctatcagctatcatttcaaatcacagattccattgtctcattccccaacatctctaatcacatctgcatctattacagttgctgatcttactcatttcatctaaaaggaatcatgcactgtggtgtgttatttgttgaatctctcagttggtgtaaatgttttagttctcttgttattcattacagatacttcttcactaaagaataatagtttataaggtaattgtaccacactcacttaatctgtatagccactactgataggagttgtcagtgttttattgttttgctcatttaccaaattttgtggggacatttttttcatttcattatatgcatgcatcaaaattttcacacactgtttaatacttaacaaacctaccagtcattaactctgaataactcctccacaaggatgaaacagaaagactgctggcactccacaatgttcatgattctcagaagttttcataagttgaaattgattaaaaataatcataggttactttttctcaaattatgtgctgaatgtattcacagtgaactaagacaaccaccacttaagtaacatgctatgactttgtttaatgtgtttcactccctataagtattgtgctagacaaaagactttctcagactaagagctgcttttttaaatttgtcggttttagctcctattttggtgaaaaagaattcttacctatggtagctttcaggaagctgtctggatacacatgcaatgttaaggtgttgctctattgggatcaatgactgtttatgctccacagcatttaaataaggtatgtgttgtgttctttcaaatttgttattttttcacgctcacgaaataacaactctatatggctgattaatcttcaatagatttagcatgatttacataaagtcaagatgtgctttgcatgtaattcccaagttatcaacctgacaacacagaaaatgtggcatgcaccacatgtgaatgaatagctgagtgtcatgtatgaatgagtttcatctttttcttgtactcactccagtctaatgcatctactgtcattcatctggtaactgatcattcacttcagcaattctgttccagagctagggatatttccatataaactatcatataaaatgcaaatcattataaggaaattatttaagatataaaaagtgaattaactgactcatattgtgttaatatctaaactctccttaatctttgatcatcacagcattggtttgcatgaattctacttaataaaacccagttgtgagccatgaagtcacagacttacaagtaatgtcatgtgacttgaaaatttatagtatattttaaagaatatttaacaacaattaaggaaaaataatccaggtaacaactgagagagagagagagagagacagagagacagagagagagagagcaagaaggcagggggtggtaaggattgaagaactgagaaaggggaaatcataactgcatttaatttcaattttttaaaaaaaactcattttaaagcaagaatatttaggtttctcactgtggtcaaaatccagatttccttgtaaactgattggagttatactgcatcagtgttttacatgcatctaaacatgcatggtgaacataaggtcattgaatacccaggaactggaatgatggacagttacaagccaccatgtagatactgggaattgactctgagttctttgcaagaacaacatgagctcttaaccagctaggtctctctccagcccttgatttatttttataggaataatacagccttactatcttgaaagatttcctgtggaaggaaaccaaagattgacaaatgtatatagtgtctgactttctcatagaacctcactaaatcccctatgtgacagccaagagaggggatgggaaggtataaatggaggtgaaatgactgttgggatatagacctataatttgtccagcctggagatgttctgggaaaatggtggcacagaactttctggagtggccaataaatgattgatttgacctgaaacctacatcacaacagggagcccatgcctgaccctatctgaaggtttaggaactagaggctacatgaccaagacttaggatagaaccaaacatgattaaggaaaaaagtcaatgaaataattcctaatgatattctgttatattaattgatgggtgtctacaacaattatcagagaggcttcatccagcaactgctgggagcagatgcagagaaccacatgcaaatattaggagatagaggggaaagaatataggcaccagagtgggttaaggacaacatgagaacatggaaaacagaataaactaaactgggctccttggtgatctcagaaactgaaactgcagtcatggactctgcatatatatgttatgattgtgtagatttgtgtttttgtggcacacctaacaatgggagtgtgtgtgtgtgtgtgtgtgtgtgtgtgtgtgtgtgtgtgtgtgtgtgtgtcagggagaggggaagtatttctctgactcttttgccagtctgaaaagtagtatttcaagtgttttcattgagaaaattttcatctgtgtttgtcaggaagatagatttataattttcttttccttatatctttatctggattgactatcagtataatatgactccacgaacataatttgtcagtattctaagtgttctatctttcctatgttatagaccactatgagagcaattgatggtagttcttcagtgtagagctgagcccatataggtatctaatatggattttattttctctttagtgtagaaaagttttagtagtgcttcattctttctatttagtacagatttgtttaaattatctcatgtagtttaatcatatagtttatgtgcatttgaaaagtcatcctattcttacagaattttccaattgagtggaatgtatgcatttaagaaatgccctacaatttttctaagtttcatttgtatcttctaaaatgaataataaaaaatccagagacagttattgaggtttaagctgaatattataaaaacaaagcagccaatccaccagagatctcttacctctaccatagttggggcaatcctgtcctcaacatggctggagactaattgccaggtctgaaaccctgctcctgtttttgttttgttttgttttgttttgttttgttttgttttgttttttgcaggtgggtgctggtggcacacgcctctaatcccagcactcaggaggcagaggcaggtggatctctgtgagtctgaggccatactggtctacagagcaagttctaggacaggatccaaaataatgcaaagaaaccctgtcttgaaaaaccaaaaaaaaaggtaaaagacaaatttgatttatgtgccattattctatgggaagctttgaaaattttaatcttgattaattttagtttcttttttaatgaatcatgagacatgagtcacatcttacatctaatttttgtatttatctactttgttcctgtcttacatatcttctagtgctgagattaaaattgtgtgctaccactgcccagattctatggctaactagtagggcttctgggattaaaggtgtgtaactccactgcctggactctatggctgtagctagctttgaattctgactccatgaaagctttatttgatcatatacaatatattatttcaattccccttttctgtctaatacaaaaagaaggctacaactaatacaagaaaaacaatttataataattataagtatatacaacatatgtagccaataagtacatcaacaatgtctagtccatttacatttgacaaattcagagaaaatactctattatctatcctatctgtgattccaaaaggttgtaccaaatttactttctattctaatttgcattatcaaattatcttttaatgtctcccaaacttttgcattttacaactctttaataggtttctccctgatcttgtaaacaatattttctctttattctgtagatttggtgttttgattattatgtgtcaggggacttctttttgtggtctctttggtgtcctgtaagctttgtactttcgtaggcatgtccttctgtaggttggggaagttttcttctatgattttgttgaatatgttttctgtacctttgagcagtgtttcttcacattcttctatacctattattcttagatttggccttttctctgtgtgccatatttcctggatattttgtgttagagatttttttggacttgaggttttctttggttgatggatgtatatcctctagtgtgtcttcaatagctgagattctctcttccatctcttgaattctattagttatgctcacatcttttatccagcatttccatttccagcatcacctcattctgtgttttgtttattgtgtctatttcagatttcatggtttgaactgtttcaagagcttccttcacttgtttggttgttttttcttgggtttcttaagattctttaagagatttgtttatttcttgaattttttggtttgtcatttcctccatttcatgtaactttttgcttgctttttcttctatttctttaagggattttcttgtttcctttttaaaggtctctatcaacttccttagataatttttgaggtccatttcttcttcatgctctgtgttgggcttttcagatcttgctggagtggagtccctagattcttgtggtgtcatattggtctttctgttgttgagtgagttcttattctgtcttcttcccatatattcttccagtggatgcaggtggggtctctctatctcctcttgtgacctagtggtgtgtgggggccaggaattcaatgtccacagctctagataatcttgcctttcctggtagtctcctcactctgaaggagctaggccactgtaggggtcaagtcggcaggaagggaaggaatagtgggcatgtctaccccaagcaggtgcaggccccaggagatcgtggtgaatggagctttagacaggaattggtaagagcaaaggatcactcacctcgttatggatcaggtcagtggaaagggaaggctcaagtgtgttccttaatggaaggatggatcctgttttcatatccattctgttagtcggggtctttctttcagaatattgaaatcactgatattaagagttaccaataaatagtgttagttctcattattttgttgtgtgagttcctccttctttggaattgcttgtctcatattatttaatccttgaactttcttatgtgtgattaacctctaaggttgtaatattccttttagccacttcaatagtcttggatttatagatagattgcttaaatttacttttatcattgaatgtctttccttctacatctatcgtgattgaaaatttttcttggtattgtagtctgactgtggtctttttcccttacactatgcaggacaactgtccgggtacttatgattttagagtctccattcaatagttacaggttattctaataggtttgccttatatattgctttcccttgaagcttttaatattttttgttctgcacattttatgttttgattattatgtaccatcgggaattttgcttcatgtcatcttttaaaaattattttacataccaaccacagtttgcccttccttctttcatcccaatccctccactcacctacccaatcctttccttctccatctccacttagaagtgtaagaactcccataggaatcaacaaagcatggaacatcaggttgtggcagcaccaatatcctcaccagtacatcaaatctgaacacagcatctgaccatagggaatgggtttcaatgagccagctcatgctcaaggaacacattctggtcccactgctggggaaccaataaaagaccaagctacacaattgttcactaagatgcagagggccgagtcaatcccaggccagctccctagatgttcacatagagtctgtgagttcccacaagctcaagtcagctgtctctgcaggtttccccatcacaatcttgaacacacacttgttcatatgctccatccaccctctattcagctggaatcctagatctcagcctagtgcttggatctctgcatctgcttccatcaggtaccggatgaagactctatgatagcaagggaagtcactaatctgattacaggggaaagtcagttctgggatcatctccactattgctaggagtcttgtctagactcatgattgtaggtttgcaggagtcttcctggcattaggtttctctgtaaacacacaatggcccacccatcaagataccgcccccagcactgtcccacactatcccacctacaactcaaccatcctgatcccttatatttccaccccttattccctccttctattgtagaggaagctgtagcggtgcctgcttaggggctggttaaaggtgtgcctgaccaagccttcgagggcatggtcagggtgacttagagtgagagttggtcaggtggctggtttctggtttcattttcacttttgggttgctgtacagactgctgcccgctggccaggtaggttgctctgtaagtaaggctttttccttattaaaatcccttgtatttcgacctggctccatattgataatttcccgctttattctacttctcctgaatacagtttacacagaacatccaatctacatctacttccaagggcaatcaatgtgtcctacttagggtcctccttgttacatagattctctggggctgaagattgtagattggttatctttgctttacatctaatatccacttatgagtaagtacatactgtttttgtcattctaagtctgggttacctcagtcaggttgactttttcctatttctgtcaatttgcctgtgaattttatgatgttgttgttatttcctactgagtagtactccattttatagatataccacattttcattatcagttatttggttgaggggctatgttgttctcagattctagatattataaatactgcttctgtgcacatagttgagaaattttccttgctgtatgactgagcatccattgggtatatgccctagagtggtgtcactgggtcttgaggtagataaattctcaattttctgagaaaatgccatactgatttccaatgtgactgtacacatttgcactcccaccagcagtggaggagtgttcctttgacttcacatcttctccagcataggctgtcattagcatttttggtcttagcaattctgacaggtgtaagatggtatctcagagtcattttgatttgcattttcctcatgactaaagatattgagcacttccttaaatgtatcccagccatccaaattcttctgttgaaaattctttgtttaaatctgtgtctcatttttaaaaggattgtttgcaattttcatgtctagtttcttgagttcttaatatattttggatatcagccctctgacagacatgggcttggtgaagatcttttcccatctgtaggctgccattttgtcttattagaaagggtcctttgcctcatagaagcttttcagattcaggaggtctgacttattaattatggctcagtgcctgtgctactggttttattcaagatgtggtctcctgtgacaatgtgttcaaggctggcccagtttctttgatgttctatatgctttttgtaccctgatagccaccacattctttagattggggaatttttcatctgattttgttgaaaatattttctctgcctttgacctgggtttcttctccttcctttattactattattcttagactttgtcctttcacagtatctttaattttctggatttttttgtgctagaatacttttagatttaatattttctttgtctgttgaatccctttctcctattgtgttttcaatgtctgggtttttttcttccatctctgtcttctcttgatgaggcatgcctctgaggttcctcttaaattttccatttccaaatttccttcagtatgcattttctttattgattcatttgttaatcatttattgattctaatttaaggtgctggtatatgatattaagtttgttgggttgacattttgtaccttgctttctgctgccctcttttgttcttaaaagtgtgtggccatgtatggcctggtaggcatattttctgggattctgctagggttgtctactgggtgtcccaggtagaatgtgtttctaagtgttggaagctgacatttagtaaaggggattggcttggagtggagatgaatcagtcaaggagggaggaaacaggttgtttctccaggatctcctttgttcccctgggaatgggggcagagaatgaggaaaggcaaaggcaggtggtctacagaactggagataagactgtcagggttggatttggaggagaggaggtgaatgaacatcagaagagcacctacctgttccttaccctttctgctttcctggtcagtatagccaggaattcccagggaatgacttcaggtataggatgagacaaaggaatgggtttgagaagaaggatatagggaaagatttgtgtgattctctggagatgggaatgagactgggcaactgagtttggaggaaaggtatagacagtatctttcccaactagtcccacaccccttgatccccaaataaatacaccatgcttctattatttataaactgtttggccaatggctcaggcttcttattgtctagctctctttaattattaacccattttattaaactacatatctccatttagtcttgacctactggagaattcccagaccttttactcctctagcagctacatggtatctctctggaggctcctctctgtgtcccctccaagaattctactcatctgggagccctgcctatacttcctgcctggctactgagcaatcattgtattattcttcaaccaataagagaaacatatatatagaaggacatcccccattggaaagggggagggggaagatctggagactgcttctaagtacttaatctttgtatgtacctaatgggaagcatgcttaaaagcctatatatacaacatttgcatgctgaaaatgtatattttgggatttttgaatagaaaagaaaggaaactttgaatcttcaaacattaaagacttacagtagtagaactttgcatgaccatacacacacatgagaggcaagggtagagacagacagacagacagactcagacacacacacacacacacacagacacacacacacacacacacacagacacacacacacacacacacacacacagagagagagagagagagagagagagagagagagagagagagagagaacaggaaaagcaaacaggtggtttataataccagctatgaaggactagaactgcttacaacttcaagtgctgatggtcactcagaggttgaaaaccttcccaaaatactgtatacagctttaattttaatagagtttcattgggtatatgtaaatatttacaaatgaaacacaaggtttgatttaatttaataatgattgtaaaagtcaatacccaagatttgtatctatggcttatagaaatatggagaaatgtgacaccatgcccagaaggaactaataatgttataaactttctgatattcattaaggcataaaaatcagtgagctgctgatttgtctggattcacacatttcttccaaatacattaaatattagcaacaaatgaatggaatatttcacagtagtaaatgatttaagctttttttacattgtagaataatagatggaaatatagcagtatatggaaataataagaatagaagagtttcagtgccttagttggaacctcctgaggcctgggaatgtacacaggggactaatgttgggaaatcagctcatccagagcctgccagtatcatggtgctagtcctgcttccacccacaggaggacataagcatgggcttgtttctggcccaccctctggtgcccatattggagtctccagagggtctgtgcacaggggattctgtctttgtgaaacagcccatccagagtctgctactatccaattgaaagatcaatatgacaccaccagaatctagggacttgacactagcaagacctaaacatatcaacacagatgaagcagaagagaatgaaactgtaaacaactttatgatgatgatagagaccctcaaaaaggtaaggagaaaatcccttaaagaaatggaagaaaaatcaaactaataattcaagaaaggaaggaaaattcaaaccaaaaattgcaagaaataaacaaatctcttaaagaaaacaaggaatgccgtgtaaaaacaacctttctctgggggaccatgtatgtctctcttagaaaggatatagtcagcaaggcataatggcagcccacagaatggtaaaagttattcaccaacctcatatccaacagagggctgatctccaaaatctacaaagatctcaagaagctagtgtccaaaccaccaaataatcaaattaaaaagtggggtacagaaataagtagagaattctcaatagaagtctaaaatgggctgatagacacataagaaagtgctcagcatccttagccatcagggaaatgcaaatcaaaacaattctgagatatcatctcactcctgtcaaaatggctaaaatcaaaaaccccaatgacagtttatgctggatagaatgtagagttaggggaacactcctccacagcttgtgggagtagtgactacttgtatagccactttcaaaatcagtatggtggttcctcaggacagttggaaccagtttgccataagatgtatcaattccacacttaggcatataccaaattatgcaaattcatacaccaagcatatctgttcaactattttcatagcagcattatttgtaagagccagaacctgaaagcaaactctatgcccctcagctgaagaatggataatgaaaatgtggtgcatttacacaatggagtactactcagcagaaaaaaaaaaaaaccaatgtagtcttgaaattcgcaggcaaatgcatggcactagaagaaaacatcctgttacaataaatctttgcgccacctgcttgagttctgcccaccacagggatggacaaaataatacagagacttatattaggaacacatgctgcttggccaatgactagcatttctcaactgctagctcagtcttaattatcataaatatatattttataagacttatcttatcggacaccttctgttggcatcttcatccctgggatcacatggtggctccgagcagagagcagaaggaagatcaaaggggaaaaggaaccacttcctacttgtccttgcttaaatatgagtctccctgctatgtcacttcctgcctgtatcgccacttctttactacatttccttgacttctagttccatctaactttctttcttgttggctaaacaatactttattcaacaatctataagatgaacatacacagaagtacattccccatcatctcttcttttctgtctaaataaaaagaaggataacttatcttttataataactgaagaaaattataaccataactatctgtcttcaattctatcaaagaccacagaaggataatatataaactctagaattgacagagtcatcttgctacctggacagttacccagcagtcactttcttgtgggtcctgcatgtccagtttatacagcaacagacagtccaggcaagagcagtttcttgtccaaatggcaatcttgccatattgaacgcaaactccaaaacaagtttcttcgatgcccatcatcttttctgatgtaatcggttaccaggagcagttgtgtctcattgccaagaaaaacctaaaccattaaaatgctatttattctgtaggtctttgaaaggtttgaagaatatctatccatctcaaatacatctttgtatatctagaaaacctaactaacctaattataagttctgactattatatgtgactatataacctgtatttaattaagtatatcattttaaaagatctttataaaaacaaaacctaaacaagaagagacatatacatatcccaaaattgaccttaaatttgcatcaataaatgaaaatccatagcaatgcacagaattcattcctataccatatttccctttaaaaagaaattgactatgctcattactatttataaccaaccccatttaaatgattgttgaggcatctactgtgacaggtcataagttcaagtctcagtttgaatgtttggaagacaatttacagaacagggttgacacattagataagtccattcggtcggttgctaaggtatcaacctcaacaagtgacagacttgagtctacattccgatatttagaaggcaattcccatgccatccagatgctgtctaaggatgagcatattaaagagttagaaacacgtgtagatgggcaaatagagaaatttactgattctctaacgtgcttggaatcttttatgatacaggaaattgaaacttttattgaggatattatagctaggctgaaagatattgtgtgactacacgagacgatccatagtccctatggtcaagatatctttattgagataaataccagccaaacacaagccagagcattcccagggcagcctagcagtgaggcaagggataagaggcttccatatgctctgcagtcacttaagagcccatgcctcgtcaccctgacctcaccttaaccatgccttgtcagtcatggtcaggcacacctgtagccagccactaacaggcatggcttactgtcctctacaattccccttttagtctagaacaggattaaaagttaacagtgtaaagtatccaaaattaacaatcataaaagtgaaatacaataagatgcaataatctgctattgcacatcctaactatgtctatttcatctaaaccctagagtcatctgaaagaggagtccaaacctgaatacctccttccaatcccaaccctaaataataggaaagttattcctaactaggcttacactaccctaatagacaataataggggatgggtatgtagcatcttccaagttacttcctgctgaaatgggatgatggtagccttgtgcggtcctgtgggaagaaaatgttagtatagtgaaagtctctaatggattatccagtccatgttagatgggaattgcttgattgaagatctaggttgaaatcctcaacttgattgaagtcagtactcaaagctttggttagagtgtcagttgaaatggagtaagttggatccagtgcagtcgaggaggtatggcccaatttcttttccggagcatcctgggattgctgtcaggcaggtcttcactggctgtgtgggactcaaacataagtgttagagaaatgtttgttcgtatatgtatgtgtactgggaaaggcaatcatggaaaaataatgattgtttgactttgtataagttgaaggaaagagccaagaaagacaaagacaaacccaaattcctctcttgttctgcattacatgaattggtttcttgatataatacagaaactctaaagtttagttaaacatcatgcttgggttttatgggaggaaggccaaatccaactctaaattcaacattgatttacttgaatagggactaggaaataaggagaaatagagttatttgagaaacagctgtaaagtttactgtatggcatgttccttttgtttgatggttatagcaaccttctcaccttaagcatctacctatgtagtgttcttggacttctggagatgagttttcctgtgaagatagaaacaaacacttccctttcctttaggagatttctatttagtttataagatatacctcagtaaatacctgtcacttgtccttgtggagatgtttgtctttttcaactcgaatcttgatcaactttgatggtatccaaagtttttcttctcctgtggaaacaaatacaaaacccctaccccaatgtaacacatgtccaggcttctatacagaggttagtacatctttgaagtatactgcttgattcagttcagcaggtttttcatagtccagtgtctttctgtagctgtttgtcctttgtcattggcattaagaaagtttaatgtcaacaaatcattatgcaacctatatttgggggattttgacttacaagcttgtctatggagcacctccttaagtgtcctattagatgtctcaatgactgcttgtcctgtaggattgtgtggtatactggtgacatgctttatgttatagtattttaaaaagtgttccattttgtggagacatatgccggagcattgtcagtttttatctgtgcaggtatacccataactgccatcacctctagcagatgtgtaataacagaatcagctttttcagagttgagaacagtagcccattggaaacctgagaatgtgtcaatagtatgatgcacatattttaaatttccagattctgtaaagtgaaagacatccatctgccagatctcattctcctaaatacctttaggattacagccttctggcagtggagtttgcttataaaaggaacaagcaggacagtttctcactatctccttggcttgttgccaagtgatggagaagtccttttttaaacctttgctatttacatgatgtttttttatgaaattctgaggcttctagaacacttccaattaataaacgatcaatctcatcattgcctcgtgctagtgggcctggcaaacccatttgcgatctgatatgtgtaatgtatagaagattgcttctgtttcttattgtttcctgtaattgtaagaacaatgaggttaattccatattatcaggaacaaattctgcaatctctatgtgtaagacgactctctcagcatattgggaatcagtaactatgttaagaggttctgtaaaatccataagcaccatgagaattgcatataattgtgcctctgtaaagatgtatacagactttgaactagtttacttacctcacctgctttataaccagccttacctgatttgttagcatcaatgtagaagataagaactccagaaatgggagtttgtcttcaatacatgtaagaatccagactgtcttttttatgaatttaattctgtctactcctctggtcaatcagtctaagaagtccttgaatagtcctgttggaccctgttctggtgtaagcttccagttgttctggctcatgaactttatccaatgcgtttaatgttgctttcctgcattgggacagcatatggtcgtcatattcagcctgaacctgtaggtcagcataaataccttctcccaggattttttcaagaggctcatcatgactgtccctaatggcgtgacgttcaataagctttctttcttctctgattaatgccttccattcgatttgacaagaattctcaagtacagctgacaccagtcctacccaatctgtgggcgtcaccctgttaaaggtggcccatgaatgtaatagctgttttacgtatgggctatgaagaccatatgagacaactgattccttaatatgctcaaggtccttcaactgtataggctgccatacataagctacctgtccctgggagtgttttttattggtgattttctaccaatgttgctgggtagaccaacctttaacagggtgacgcccacagactgggaacaattggtggcagctgtacttgagaattcatgccaaatttaatggagggctttgttaagggaggaagggaagctccttgagcatgaaggcataaaggacagttatgaagcccccctacataagattcttggtgagggtgtttatgctaacccacagtctcaggctgaatatggcaaccatatattgtccctatgcaggaaggcagcattaaatgcctgggataaagtccatgagccaggagaatgtgtagaagcttataccagaatagaacagggactgacagaatgttccaagaccttttacaaacattaactagagcattagaattacaggcaacagatcctgaactaagacaatcaattatatatacaatagcttatgagaatgcaaacaatatgcaaaagaatacttttgcctttaaagatcagatcagttccgttgaagaatgggttttgcatgcagccaaccttgactataatgtacaagatacaggtgcttaggtaggagaggcaatctcgaaaggtttaaaagggcaacaggtgattaaaagttctagatgtgaggccctaccattaaaatggcttacagatgaaactgtttggattggacaatggcctatgacctctgagaagctagaaactttggaaagactagttcaggaacagctagatgctggacatatagagaaatctacaggcccttggaattctcctgtatttgttattaaaaagaagtcagggaaatggagaatgcttgcagacctgagagccatcaataaaatcattcaacctatgggctctctacagcctggaatatcgttgccttctttgattcctaagggatggccgatcatagtcattgatctgaaagactgttttttcacaataccattacaagaaaataatagagaataatttacatttactgtaccaacttttaataattcacagccagttaggagatatcagtggaaggttttggcataaggaatgctaaatagtcctactttgtgtcagcactttgtacatcaacctttagaaataatttgtaaaaaatttccacaatctcttgtttaccattacatggatgacattctttttatctgattctaataaggaaactttggaacatatatttgaaatggtgaaggaagttctgcctcattggggttacagattgccccagaaaagatacaaagaggagattctatgaattatttaggtaacaagatagatttacaggccacagaaggtacaaattaggagagatcattatcaaactcttaataatcttcacaagcttctaggggaaatttctcaactacagacgattgatggtgtaggacatgacttaaagcatttaaaaatggcccttaaatgtgataaggacctaaacagtctgaaaatattatctgctgaggtggaaaaagaattacaacgggtagaaaacagaatattggatgctcatgtagattgaataaaccctaatttagactgtattctggttatcttgccatccagggaatgcccttctgtgattctaatgcagagggaatatgtcatattggagtggatatttctgccacataaacagaataaaaaactaaagacatatatagaaaagatttctgatttgaatctaaagggcgaattaaggttccgtcaactgactggaaaagatccagcaaaaattatagtaccttgaataatgaagaaatttcctccatatggaaggacaatgaatattggcaggtagctcttactgacctttggggaacaattagcaacaattatcccaaaactgacagtattaaattcataaaaaagacaatctggattcttccacatattgtacgacaaactcccatttctggggatcttaccttctacactgatgccaacaaatcagataaggcaggttataaagcaggtgaggtaagtaaagtagttcaaagtccgtatacatctgtagagaaggcagaattatatgcaattctcatggtacttatggattttacagagcctctcaatatagttacaaattctcaatatgcagagagagtcatgttacatattgagactgcagaatttgttcctgaaaatacagaattaacttcctgtttgtacaattgcctcacactatcaggaacagaattaatcccttatacataactcatatcagatcccatatgggtctgccaggcccactagcacaaggcaatgatgagaatgattgtttattaattggaagtgttctagaagactcagaatttcataaaaatatcctgtaaatagcaaaggtttaaaaaaggacttctccatcacttggcaacaagccaaggagatagtgagaaactgtcctacttgttctttttataatcaaactccattgccagcaggctgtaaccataaggcattcagagaaatgaggtttggcagatggatgtctttcacttttcaaaatttggaaatttgaaatatgtgtatcatacaattgacacattctcagggttacaataggctactgctcttaactctgagaaagctgattctgttattatacacctgctagaggttatggctttcatgaatatatctgcacaaataaaaactagcaatgcaccagcatatgtctccactaaattggaacactttttcaaatattataacaaagcatatgactggtataccacacaatcctactggacaggcagtggttgagagatctaataggacattgaaagtgatgctccataaacaggctgggggaacaacccccctccaaacatagattacataatgctttactaacagaaaaactttcttaatgccaatgagaaaggacatacaggtgctgaaagatactggactacagaaaaaaaaaccctgctaaactgaatcagcctgcatactttgaagatgtactaaactctgtatggaaaccaggacatgtgttacattggagaaggggttttgcatttgtttccacaggagaagaaaaactttgaataccatcaaagttggtcaagattctagttgaaaaggaaaaacctctcaatgaggagagaggacaggtattctacaaaggtatatttcataaactgaattgaaacctcataaaggaaaaggaactgttttgtttttcttttcacagaaaactcattcccagaattcaaaggacagtacatgggtaaaagactctcctatagatagagcttttattatatcacatataaatgtaaaaatagagctatcacatgagctagtataatgtgcttaagttgttacatagtttatgtaccgtatgttaccacaaaataaagtttctgactagctgtaattgtgctctatatgtttactgtaagtaagaaattttatgtggaatagatttgaacagtaatcttgcccaattcctgatgctgaagcaaaatgattcgcatgttatacattgtaaaaaggggttcacatggttcataattcgtcagattttagagcgtggtgggtgctcaattctgggaatgcaagaagccaagcaccataacaaagttagaagtgccaggagaagaggtcacatggacatctagtaagtgagacttgaagacaagtcagatgtgcttttatcttactgtatgacaaatattcttttgcaaacattgcttacaaccatgtttgacctactcctcaaatacaccattaatccatttagtggtttggctctcctgacctaagaacttcaccaagattccacttcctaaatgttccaccatttcatctctgtgattctggacaccatccccaagcacataggccttagggcacaggtcacatttaaacagtagcatatgcatttcctccaatcaaattgccagattttttttctagaaatatatggatacaaatttctgaggtagagaatttacatctaatttttctcaattatgatattctacttactctcttatagggaaaatatgtgcttgagatgtttttataatttttggtgattgtggtttgtttttttccaattgaaatttttatatattcctgagtgttttaaaccattcttgctattaatgctttgccacttttatattctgaagataccaactcccatgttgaacttaagtaagatatagggggaaatgattttaaaatggcattgttcataatgtatatgatgacattatgtaactctgtatacagcagctttcaaatagattcagtaaagatcaattttgaagaaaatgcagcacaatgacttattctccaggttagaagataaacaaagcttcagtatttaccctaaggaggagaacaatagaagggtgttggcatgttatgatcccatagttaagaaaactcactggaggttttggaaccatgtcaaatttgagatctttgcaatatttgacttctgatttgacaaacacctgagttcatggttaacatagtctctgccctttcctaggaaaggtcaaccaaaaaacacagtcacagaatatatatagtgagcaagaggaaaaggagaattaaattttcattcagactacaggaatctaacagtaggtatgatactctaaaatgtgtgtattgttttgctttaggttcagtattaaaacggcatgaatgttggtagttatagccttgattttattgctaaaattattgtcttaatgtgtagctttcctatttccagcttatttggcatcttgataatatggaactaacaaaaatttaaaagaaagaaatatcagaagccttatgctgtgcttgtgacagaagcagggacattacatgtggagtacatactttctacggcacctgaattgacaaataaataattattaaaattgtgtgtacaggatatcactttaacataatatttataagggggtaggaaagagatgattattactcatgcttgcatttttagaagcacatattttagaaattttgagcattttggtggaatatgtgtgctctccatagttatgaaaggaggccaggttagatgtggccagacaagatatattggtactcacagctactacatatgaaagctcattcacgctgattttttccatctctcctatccttcaaattagccttcactactctcctcattctgctgtcaaaattctaaagtgctttgaactaattaactcatttaaagttattgttaaataaattatatactaacctgggtttttcaggataaattccaaagagacatcagtgatgtttattagcaaacaagacagaattattttattgttattaatagccaaggtaaagaaaaataactttaatgatttatattatcaattttaatttcatctaagatgttctttgagaggtatggagttcatctaagactcatcatataacatgaaaactttcagttatggaatgttacatatagacataatacatttgctataagctgagttaatactcttctattgggcactgttattcataacaataactgtttccctgcaggtgaaaatgaggtggctgctgagtacaatgtgccttgtccatgtatgtggaaacatattttgtttatttgcaacaaccatgaatcctgaagtccacatgaatgttgtaagctattcttatcactaataaaactacatgcatttgctttatctctgttaactccattcatcttttctaaatcagtgtatctctttaagtctgaacatttaccaagattgaagacttcattccaagaaaaaaaattctattttaagaatcaggaaaaatgactgagaacaaaaggattcatgaaacttattactgtgttttctctcctagagtgaaattattatccgttggggttatgcaagtgaagagtatgaggctgtgactgaggatggttacatcctcccaattaaccgtattcctcatgggaaaaacaacacgaatagcacaagtaagatctgagtaagacaagtattgaagaatcccgaggaaataacatgcattatcttcaaattgagtaatttcaaaggaccagttggagctccttgtctccaagaaataagcttggggcctgaaaggtacctggtttctattggcactttgaagactgagatcttgtaggagtggctcttcttttgcccagtgaatattggttaatattgactgacataataagtggaatgaagtcttagcacatctctgttccctcatttcaaaatcttttcagttctcttgtgactatttggaatttgttgatttcatgttcaatggaagctaatgttgtaaaacattttcattgttgttttggcaggcccaaagaaagtagtactttgtcagcatggcttgtttgcaacacctggtgtgtgggtttccaatcctcccaacaacagcctggccttcatattagcagatgctggttatgatgtgtggatggggaacagcagaggaagtacctgggcaaaaaaacatttgtacctggacccaaactctaaagaattctgggcttttaggtaggaaaaaaactccatataatactatatttgccttaagagagtgtcaaatattttaatagtaaaataaagttgtgggactggattgaaagcatttcacttggagtggtattttagattgatttgagtgacatagtttaggattttggattgtggttactatgcttaataactagtataaaatgttcattatagcctatatttctactcttgaaattgtcgttttttctaatcaatccacttatcttaaaaattatacttatctcactcgtgtgtgtgtgtgtgtgtgtgtgtgtgtgtgtgtgtgtgtgtgtacacaaatgatttgctgcatgcttggaagccaggaaacaacttaatggagttggccctcttcctcaaccatgttggttctggtgattaaactcagggtaaccagcttggtaaatagtgcctttgcttacctagtcatcccacatgcctcatccatgtccttataaaattgattcgctgaagtaagtttgttatatttaaaacattgaaacattgattttgcaaatatagaagtatgcattcagccattttgcattactttttactttgattgtgtatccgtttgtgagtgtctgtctgtgtgtgtgtgtgtgtgtgtgtgtgtgtgtgtgtgtgtgtgtgtgtgtgtgtgtgttggtgtgtataacacgtgtatatccatgtgcatgtgtttgtgtgaggatcagagcacaaattcagttgtccttctttagacacaatgtccactgtggaaatcactaacctgaagagactgactggtcagctaaacccctacgatatatttatttctgcatctgtattgctaggatttcaggaatggaccagcatgcctgcctaatttttttaggtgggttctgcagatcaaactctggcatcaattactttccaagctaagctacctccttagatctatactgttgatattttgtaagtggaatgagtaatagacaagggtgaaaagacacgggtaaaagtacatatgagtgtgttggctcacagagtagtagaatatctcctgaagttattctcaacaagttatttaaacaagttctatcacattcacatccttggatctctaacaacccccctctctctctttgcacacccctgacctcttctctctttgttgaggattagcagagattttacagcttgatttccaatcttaaataacatgttcatatggagaacctagaattttagaaatttagctgtagtgcaaaggtgttctgaatatgtctaacagttcatttactgtggacatagcaatgctagcttaattcgtttcaaagtgtatacctgtagatacacatcacatgaaatgtgtcaacacagaatagcggtgattatacagaggtagcagagtaaccttgcaagcagtaattttgagccatgtctcacaaatgcctcccttcatatagactctataaagacatcatttaaaacagaaatcatttatttatagattaataattggatcacattttgtcccttttgttttcatgcagttatgatgaaatgataaaatatgaccttccagccaccattaacttcatcctgaagaaaacaggacaaaagcaaatttactatgttggacattctcaaggcaccgttatcggtatgctgacaaagaacaaaattagataatgccgaaattttatcctgaagaacacaaatatatatgcaaattttgcaactatttgtaaaacacatataagctttttgacagccaataacaactgtaacctgctataaaatgccaaatgttgaaaccataatttctaacatacaaggtattttaatgacgtgcatgtgtgagatacttctaagtttctccatagctagaatttctgatactaatgactagacttctgaatgtgcgcacatacgtgtgtgtgtgtgtgtgtgtgtgtgtgtgtgtgtgtgtgtgtgtgtgttcttcctcatatggcattgcacatgtggaagattcgtgtgtcaattctgcttagaagaagtttcaagagtctgggtccactgagctcttaagttggtcttctcttggtcatttctcaacagctttattggcattgtataagcttgtacatagtatatgttttcaaagaaaaaaatttctagttctatccattttcctgaaaatttcataatgtcattgttgggtatataagctagcttgttaggacccagtccctttgagggggtaccaagttctgccttaacacagaaggcaggggcttggtccttccccaacttaatgtgtcagactttgtcagctccccagaggagcccttacctgttggaaggaatggatgggcttcggaggggaggtaaggcagaggggcaggaggaagaattttagttgggaaataaaatgaaattaaaaaaaataagtaaataaaaatatttttaaaggaaccaaacgagccaggaattggtggcgcactactttaatcccagcacttggtaggctggtattaaaatcactgagttcgaggacagcctggtctacagagcaagttccagaacaggctccaaattaatgcagagaaaccctgtttcaaacaacaaacaaacaaacaaaaaaggaccaaaggatagatgtctgacttccaggaaaactatttctaactaatgtatacatttgttcaacatagagtatgatagatagattattaatagatagattgattatagatagctatgtagatagatttatatatgtgtgttcacctgcaagagtgggctggagatgatgcagtagggtgggtgtcttctccaagagtacatttttcataagtgctgaactgatccttaaatatggtgaatctggctactcaaaatatcaaggagccaataaatcataaacagagttattcccaacagattgaatggaatttaaatgttttaaagtcataacactctgatgagtaaactaagggaaatctccaaggcaaattttaaattcctgacaaagagcagtaataagctttgtgaaacatcctaaccacacagacaattttaagaaaaaaggaatggcaaaaaaataatctcttcttatttctttcagctctgggggcattttccacaaatcaacaactggctgacaagataaaaatgtgttttttattggctcctgttgctactgttgagtatgtcgaaggttttgcacgccttctagcttacttccatccaacagctttcaaggtttgtgatgaactcaaagtggtggtataattacacttttcaaaataagcttactaaagaggagatcttcctgtacaatcgagtgctgattcacttgcatgaatagcctcccatgattggctacctcaaagttgggcagcttgagttttgtcctatggactttcttaagcatgattgtatttttctttaatctatagctgcttcttactaatttaactcttcatttttaagaatttcttatgttagtattgtatatacataatttccatccctccctatactctcctaacttctcccatgccccttctccctctcacattcatgacctcctctttaattgttatcattataagcatctgaacataccttttaaatccattcagtattccttgtatgtatgtacatatgtttaggtttgatcactctgtattggatgatctttttaatgtttcatattgcaaattatcataccttgtattgcactttcaagttttctttcactggcttcttaaaattgccatactacattttgttagttatgtgatttcttttacacttgcactcaacttgccagtgtacacactcagttctcttcatttttcttgatatcattatttttgttatatagctactgccagggcattgtagaactgttaagataggtgtccactaaagataaaaaaaatcgcaactgtcaaccttcaaggtgatggcattttttacttcgtcagtttggatttcatcttatgacactatcaggatcccaagacgatctatgatattgcatgccaccagcaaagtgtgatggtaaaatccctctacttctttgacatcacttaaggttcttaagtacttttcactctctgcttggtttagagcaccaaaatgtgctttcatttgtatatagttgtgactaaatgtagggcatcctttcaattgtatccttccacttatataatcaatgtccctttattactgaagacttcatttcttgtttatacttccaactattttaaataattgcaccagtgttttgtcttgaaaatgttcatgtcattttagaaagttaatccatacatgtaaatgtagaacaaacagaactattgtaaattcatggccatcctgagctacataggtagtacttggcatgcataggaaacacagcaaaacttctcaaacatagaaaagaaaagaaaaacattaggagcaagtaccttctttacctcatttgtaactctcatagccttctggggttcataatacatgttatgaagaactttgtagtattcctagacgttagttattctgaatctcctaggtttgttctatttcagagcatacatcatagtttaaatccaaaacacaagaaaaacaaacaaaacaaataatttgttcattgtctttttctttcatcttcccaaaccagattaactggtaatgtcaattaaggttttgataaaattgatgtctgttttttattgccatcttcaatggtgctgctgctgctgctgctgctgctgctgctggtagtggtggtgtgtatgtgtgtgatcctcttctctgtaactctgtgcaaaataatgaccagtttggtctaacacattttgcccttttgtggattcattagttttgacatataggattatgtttttataatatagttttctcttttcctctaatcaatttgatcacaccataatgtatacaatatatagtttatatctaccacattatccactcttagccatcctcctcactcagaattccaccttctttcaattcatcccatgctgcttgcatagtctattttttgattcattgaacctagttgagtatgtttcatgaacatggtaagggtctgtgtagagatagcctattcaccccagaattttgtgggtgaccctgctcagacaccccttgggggagggggtgagaagaagcagcaccaatgactcaggcactgggagtcagtgagtagcagagcatgctgcagactggtttaataaggaagttagacttgactttatactccctcccaatgtcttatttgtttaggtggctgactctgctatgttgccctttccgcattggtgtctctgggtcaggtgtctcttcttcagcagtctctgggtatagaggcaggcttggctcagggagaaagtgcctcccaggcatgcttatgcaggctggcctggacatctgtggcttctgtaggttgccagtagtttctcctacacttgaacaacatgataaaccctctcctggtcacagatttgttaaattgtcttttactgtttaaaagattgcttgtattttattagattggcaatcatttgcagaataaatgttcatagaatcagcaagagaaaatattctattatacattgaagtgcaatacttttatctacaaaatattttgtctttgaacttttcgtaaatgtatagtttcagagtctgaggatgttagcttctattagttgtcaacaataaattgttagtggatattattgctgagtgctttgtctatatacattgagatcatgtatgatttctttttactctcttaacatggtgaattaccaatttgctgagaattaagctaacaatcattccaggggcaaatctcagttttaaaatgtattatcctttctataaatcattttcaatttttaccagggcaagcagggcaactagcatcacatttcaaaatttaacatgtacatttattctctagttaatttaatttatcattgagacagcatttcatatattgtagagtggccttgaacttgctgtgtagttgagaataactttgaactgttctttatcctctttcctatgcttgttatacaatggaattttggatgtgtgttagttactatatcggttttatttagtgctagggatcaagtcaactgagctgcacaactagctgtcatcttcatttctgtgaagtatgggttgcgtttccttttctctctaaatttagggttagaataaagccagtctcttaaaaagaatggtgtctatttcaccgatcatgtgagtattaaattttcctagctggaagtttgactataagatcatttttaaatggacacaagaatacttagattgtccacttttaaattattaaacagacaatttgcctaaattctgtggccttattttatttgtgtcactcactttatcaccacaaagtatcccctaccagtctactaatagttacagattgctaaaatataaggttagagaagtttaattttactctgtaggctattccagtcgaatcactacaaaaacatttcattattgtgcttcttggatacaggcttatctcagaccactcagcactctcaagtattccctgtgattcattccctagccttgaatccctttcctcaaatagatgtgcagtccatagttagcagaaaatccaaggagaatctctgtatatctttgaataccatgtccttctcctctgatggaaaccttagctaccttttatttctccaaatttcattagctcatgaagattacctaacctggaatctgctttaggcagcaagaggctaggtggatcactctgtttattagattcagatttttcacatattaccatgtctcacagttaatatcaattgtttcagaactcttgtttttatgtattttgtgtatttttcaacaaatgctagcagctatcatttcaaatcacagattccattgcctcatttccccaggatctctaatcacttgtccatctactacagttgctgatcctactcatttcatctaaatggaatcatgcactgtggtgtcatatgttgactctcccagttgaagtaaatgtgttagttcacttgtggtatttattatagatacttctttataaaagaataatagtttataaggtaaatagtaccacactcaattgattggtataaccactactgacaggagttttcagtgtttttcttgtttggctcatttacaagtttttgtgtggacatgttttcattttattgtatgcatgcatcaaaatttccacacactgtttaacaagcctgctagtcattaaccctgaataacttttccacaaggaagtactagaaagactgcaagtacaccacaatgttcatgattctcagaagttttcattcaattgaaagtgcttaaaaataatcataggatgctttttctcaaattatgtgctgaacatcttaacagtgcactaagtcaatccctgcttaagtaacatagctttgctttatgtctttcacaccctacaaacattgtgctagataaaacacttacttagactaacagctgctcttcaaatctgtcaatttcagctcctttttggagaaaaagaatttttgcctatgatagctttcaataagctggctggatacacatgcagtgataaggtaatcgacaccacatgtgttgctatattgggatcaatgactggatatactccacaaaatttaaataaggtatgtgttgtgcagtttcaaatttgttatttttcatgctaataccataacaactctatatggctaattaatctttattgtttagcatgatttatattaaagtcaagatgtacttgtatgtaattcccaagttatcaacctgacaacatagaaaatgtggcatgcaccacatatgaatgaatagctgggtgtcatgtatgaatgagttcagcaattctgttccagaactaagggtatttccacataaattatcacataaaatatgaatcattaacaaaaggaaattctttaaaacataaaaaatgaataaactgactcattttgttaatatctaaactctccttaatctttgatcatcatagcatattatgtcctttaaaaatttaacataaaaaccaacaaaatatatgtgtgtatttattgttaagataattagagtctgggttgcgtattccagccttaatatgaggggatatgcctagtgttattgcaacttgatatgccatgtttggttgatatcgttgggaggccttgccttttctgacaggaaacagaggagcagtagatctggggagaaacgggtagcagtgggactgggaggtaatgaggggaggaaaactgaggctgggacgtaaaacattagagaaggatagacagacagacagacagacagacagacagacagacagacagacagacagataggcaggcagacagatgatagatagatagatagatagatagatagatagatagatagatagatgtaattaaagtcaactattgtgagacactcacacaaaccattggtgttcatgaattctacttaataaaacccagtggtgagccctgaaatcaaagacacacaagtaatattatgtggcttgaaaagtttatagtaaatgtttaagaatatataacaacaattaaggaaaagtaatccaggtaatgactttgagagagagcaatgcagaggggttgtggtagggaccagtaaaggggaaaaatcataactgcattttaatttcaattaaaaaaactcatattaaaacaagaatatcactgggcattggtggcacacacctttaataaccagcacttgggaggcagaggcaggcagatctctgtgagttagaggccagcctggtctccagagtgagtgccaggataggatccaaagctacacagagaaatcctgtctcaaaaaaacgaaaataaaaaagaaaagaaaagaaaaacattaggagcaagtaccttctttacctcatttgtaactctcatagccttctggggttcataatacatgttatgaagaactttgtagtattcctagacgttagttattctgaatctcctaggtttgttctatttcagagcatacatcatagtttaaatccaaaacacaagaaaaacaaacaaaacaaataatttgttcattgtctttttctttcatcttcccaaaccagattaactggtaatgtcaattaaggttttgataaaattgatgtctgttttttattgccatcttcaatggtgctgctgctgctgctgctgctgctgctgctggtagtggtggtgtgtatgtgtgtgatcctcttctctgtaactctgtgcaaaataatgaccagtttggtctaacacattttgcccttttgtggattcattagttttgacatataggattatgtttttataatatagttttctcttttcctctaatcaatttgatcacaccataatgtatacaatatatagtttatatctaccacattatccactcttagccatcctcctcactcagaattccaccttctttcaattcatcccatgctgcttgcatagtctattttttgattcattgaacctagttgagtatgtttcatgaacatggtaagggtctgtgtagagatagcctattcaccccagaattttgtgggtgaccctgctcagacaccccttgggggagggggtgagaagaagcagcaccaatgactcaggcactgggagtcagtgagtagcagagcatgctgcagactggtttaataaggaagttagacttgactttatactccctcccaatgtcttatttgtttaggtggctgactctgctatgttgccctttccgcattggtgtctctgggtcaggtgtctcttcttcagcagtctctgggtatagaggcaggcttggctcagggagaaagtgcctcccaggcatgcttatgcaggctggcctggacatctgtggcttctgtaggttgccagtagtttctcctacacttgaacaacatgataaaccctctcctggtcacagatttgttaaattgtcttttactgtttaaaagattgcttgtattttattagattggcaatcatttgcagaataaatgttcatagaatcagcaagagaaaatattctattatacattgaagtgcaatacttttatctacaaaatattttgtctttgaacttttcgtaaatgtatagtttcagagtctgaggatgttagcttctattagttgtcaacaataaattgttagtggatattattgctgagtgctttgtctatatacattgagatcatgtatgatttctttttactctcttaacatggtgaattaccaatttgctgagaattaagctaacaatcattccaggggcaaatctcagttttaaaatgtattatcctttctataaatcattttcaatttttaccagggcaagcagggcaactagcatcacatttcaaaatttaacatgtacatttattctctagttaatttaatttatcattgagacagcatttcatatattgtagagtggccttgaacttgctgtgtagttgagaataactttgaactgttctttatcctctttcctatgcttgttatacaatggaattttggatgtgtgttagttactatatcggttttatttagtgctagggatcaagtcaactgagctgcacaactagctgtcatcttcatttctgtgaagtatgggttgcgtttccttttctctctaaatttagggttagaataaagccagtctcttaaaaagaatggtgtctatttcaccgatcatgtgagtattaaattttcctagctggaagtttgactataagatcatttttaaatggacacaagaatacttagattgtccacttttaaattattaaacagacaatttgcctaaattctgtggccttattttatttgtgtcactcactttatcaccacaaagtatcccctaccagtctactaatagttacagattgctaaaatataaggttagagaagtttaattttactctgtaggctattccagtcgaatcactacaaaaacatttcattattgtgcttcttggatacaggcttatctcagaccactcagcactctcaagtattccctgtgattcattccctagccttgaatccctttcctcaaatagatgtgcagtccatagttagcagaaaatccaaggagaatctctgtatatctttgaataccatgtccttctcctctgatggaaaccttagctaccttttatttctccaaatttcattagctcatgaagattacctaacctggaatctgctttaggcagcaagaggctaggtggatcactctgtttattagattcagatttttcacatattaccatgtctcacagttaatatcaattgtttcagaactcttgtttttatgtattttgtgtatttttcaacaaatgctagcagctatcatttcaaatcacagattccattgcctcatttccccaggatctctaatcacttgtccatctactacagttgctgatcctactcatttcatctaaatggaatcatgcactgtggtgtcatatgttgactctcccagttgaagtaaatgtgttagttcacttgtggtatttattatagatacttctttataaaagaataatagtttataaggtaaatagtaccacactcaattgattggtataaccactactgacaggagttttcagtgtttttcttgtttggctcatttacaagtttttgtgtggacatgttttcattttattgtatgcatgcatcaaaatttccacacactgtttaacaagcctgctagtcattaaccctgaataacttttccacaaggaagtactagaaagactgcaagtacaccacaatgttcatgattctcagaagttttcattcaattgaaagtgcttaaaaataatcataggatgctttttctcaaattatgtgctgaacatcttaacagtgcactaagtcaatccctgcttaagtaacatagctttgctttatgtctttcacaccctacaaacattgtgctagataaaacacttacttagactaacagctgctcttcaaatctgtcaatttcagctcctttttggagaaaaagaatttttgcctatgatagctttcaataagctggctggatacacatgcagtgataaggtaatcgacaccacatgtgttgctatattgggatcaatgactggatatactccacaaaatttaaataaggtatgtgttgtgcagtttcaaatttgttatttttcatgctaataccataacaactctatatggctaattaatctttattgtttagcatgatttatattaaagtcaagatgtacttgtatgtaattcccaagttatcaacctgacaacatagaaaatgtggcatgcaccacatatgaatgaatagctgggtgtcatgtatgaatgagttcagcaattctgttccagaactaagggtatttccacataaattatcacataaaatatgaatcattaacaaaaggaaattctttaaaacataaaaaatgaataaactgactcattttgttaatatctaaactctccttaatctttgatcatcatagcatattatgtcctttaaaaatttaacataaaaaccaacaaaatatatgtgtgtatttattgttaagataattagagtctgggttgcgtattccagccttaatatgaggggatatgcctagtgttattgcaacttgatatgccatgtttggttgatatcgttgggaggccttgccttttctgacaggaaacagaggagcagtagatctggggagaaacgggtagcagtgggactgggaggtaatgaggggaggaaaactgaggctgggacgtaaaacattagagaaggatagacagacagacagacagacagacagacagacagacagacagacagacagataggcaggcagacagatgatagatagatagatagatagatagatagatagatagatagatagatagatgtaattaaagtcaactattgtgagacactcacacaaaccattggtgttcatgaattctacttaataaaacccagtggtgagccctgaaatcaaagacacacaagtaatattatgtggcttgaaaagtttatagtaaatgtttaagaatatataacaacaattaaggaaaagtaatccaggtaatgactttgagagagagcaatgcagaggggttgtggtagggaccagtaaaggggaaaaatcataactgcattttaatttcaattaaaaaaactcatattaaaacaagaatatcactgggcattggtggcacacacctttaataaccagcacttgggaggcagaggcaggcagatctctgtgagttagaggccagcctggtctccagagtgagtgccaggataggatccaaagctacacagagaaatcctgtctcaaaaaaacgaaaataaaaaagaaaagaaaagaaaagaaaacaagaatatctagattactcactgtagtcaaaatccagatttacttataaactgattggagatatactgaatcagtgttttacatgcatttatgtctgtatacactctggcaaacataaggtcattgaatacctaggaactagagtgatggacaagccaccatgtagatgctggaaattgatgctgagtccttttcaagaacattatgtactcttaactacttaggtgtttctccagtccttgtagatttatttttataggaataatacagcatgactatcttgaaagattttctgtggaaggaaaccaaagactgacaaatgtttatggtgtctgactttctcttagagccgtactgatgtgtatataacacacagtctagcaagaacatcagttcaaattgttctacattacagtcaggtacaatttttaaaatatgtctcttttcttctgcttttgaaattctccttcttcataagtttcagaaaatctttccccagtagtttttgtggtcagggcattacatcccttttgatggattaaaagaaacttatcagtatatcaaatattttcaagaaaatgtgataatcacagagtggtcatattattttatcctcaaagagaaatgcttcctattccaaaaagtaaatatatatacatacattttatgtcaaattgttaccaattttagtaatttcacagattgatgcaggatgagaattgtgggtgtctttatggtctatgagtaaactgtgatagctttcctatctacctatgtgacagccaagacacttcatagaatgagttcatcatactaatgtcatttgacaagatgtaactggtacctgcacatatggagcaagcccatcttaacttataagggtgtttttaaattaccttcaaacatatagtatttatgcttgaccactgcataaaatatgatatgaaaatttttattctatcagccaattattgataaaacattatatatcacatcctaagaaatacttctttatagtgctttgttgacaaaattctattcaggattctgcaactctcttaacatttccactttgtactacttacctctgaatattataatttcttattttttaaataagacatttatgcattattatgtatgtattaaatacagagattacaacatctaccttttttaatatttttgaaaattgtgttgtttaactttacagaaaaattatgtaaatcaaattatagatgaaggatataaaccttattacatataaaacattaatgcaagtagcaaccaatgtactatgctgtatattttgaattcatttgaattatagacagtcaacacaacttttacaagtggtaatttcagacttcatgtattttatttttcttacaggcattaatttagattcttatgaataaaaacattcgataattagaaatatttgtaagtggagattactacatactactaaaactaaatatatcaaaaaatgatacatcagttttgcatccttaagtaactaagcttttatatttcatgaatgatagtttatcagcttattgactttcttgattgcagtattatgaactgctacatgttaaacattattaaaatgtttgcaaagtatattttacttgaggtgttaaaaagtaagctttgctttcaattttcctttgtgcatattcatgtagtgtgtaattttctaagactgtaatttagtagccattgatgaggcagtacataacatcgagatagaaaatgcactgagtttgtcaaagccaatgtctcattgctgtaaaaagagctaatagaactcaataacttctggttatatcataacgtaaggctttgcaagtaatcctgccatttatctttatttaaggcaattaatacaggtgtgtttggagcttatgattggggaagtccatctctaaatatgctacactacaatcaggtaaatcttttgatccaaatttaatgatctggtccctacaaaaggcatatactataagaaatctaacaaagtctttaaaaaaaataagacaagggcacattttattttccttaagaagatacaccacagagaactttgggaaaattgaaaacacatagcattatcttttgtaagatgatactgtgaaaaacaatgttctatctatcatagtatctgaatgtcacaaaatcatgcaggattaatcatataatgatacaatcatttcacatgtaaagaaccaaggttcagagaatttaggacttgcatgatttcaaatttgaataacactgcactacaaactgggtgttgtcacacatcccagtcaccttaggattaaggattctgagaggggaggattctggcaagaatccagcataggctacatagaaaatagctgtcttaaaattaaagtaaataaatatataaaaataaaattaattttttcctgtcaaggtctaagatcatcaataatttctatggagatatcaaacacaccattataattatcttgccacataagagaataagtcatcaataacagtcttatatctttttgctaaactctttaacattttccactagacaactcctccattatacaatgtggaagacatgaaggttccaactgccatgtggagtggcagaaaagactttttggctgatgaaacagatgttgcacatttggtacccaaaatttccaatctcatttaccataagattattgctgattttagccatcttgattttgtagtgggattgagtgcttatgatgaggtgtccaaaggtattttaaaacttcttgataaatctgagactgaaaatttgcattagctttttgcatgtgtttcaaacccttagaaactttcttgccttagtaatgcagatactttttgcttgacctttttctttatacttatctttgattttcaagctattgcttcatttattggattatttttattagtgaaaaattatgtgcatcaagaaaatacttcatcttgtggctgtttcttaatgaatgtccgtttttaaaaatgttcttgacatgagtgctcttgaagagaaggcctccttttgatttgcattaatgaaatcctaaaatagtgatgcaggaagaggcctggcctatatggtgatatagaaaccatgatgtctggagagcagactataaaatgtttcacataataggaccaggactctatgggggtattattcttgttgcttagaatccacaagtcttattcactagtctgtctcccccatcacaacctgtgtggatggtttgagatgaagaagaaatatttcaagtgatctgagtcatttacagacaatttacaggattaatcatttattaaaacccctgaataatgtggtgttttatatatatatatatatatatatatatatatatatataatatgatctgtaactttccttccaacctaaggtaaccataaactgtgtgtgtgtgtgtgtgtgtgtgtgtgtgtgtgtgtgtgtgtgagagagagagagagagagagagagagagagagagacagacagacagacagacagagacagacagacagacagagagagatgttccttctgttctaagttcctttaggatttttatttgaataagtgttggacttttatgaaaatactttctccatatacaatgatcatatgatttctgtactttagtccatttatgtgataatgtattacatttattggcttggaatatatgtcagaccatccctgtattatttctggaataaagtctgcttaatgataaggaaattttgtttcttgaaatattatttttattatcctctcatacattttatcccaaaagatcccctccctacttatctgtccccaaatctgcttttcagaaaagagcaagactcccagaggtatcaaccaaattggaataacaagttacaataagactaggtgcaaaaatcatcctgaattaggtataccagaaagacaaacatggtatgtaatcaagtttaggtgaacaatagctgttaagtaaaggataatcatgttaggagccacagatctagaaaggctaagtacaaggatagttctgggggtggaacatggacctccctgggagggggaattagaacagattttgtgtgtgtactgggagctggttgggacaagaacatgggatgaaggaatggagggagagagtactgggagagacaaatagaactgagaacatttggtggtgatgtggaaacctagtgcagtagaaattccctgaaatccatgggggtgacgcaaatgaagagtcctagtaatgaggtatacagagcctaaacccgccatcttctgtaaccaggcaaagcttctaatggaggggttgggacacccacccaaacacaaaacctttgacctataatttgtccagcctgaaagatgtgctgggataatggtggcagagaacttgtgggagtggccaacaaatgactgataacctgaaacccacaccacaacagggagcccatgcctgacaccacctggaggtttaaaaaccagaggctagacatcccagagacctaggatagaaccaaacattattggggaaaaagtcaatgaaataattactaatgatattctgttattttaatttttgagtgcctatagcaattatcagagaggttttatccaggaactgatgggagcagatgcagagacacacatccaaatattagaagctagatgggaaggaatgtaggcaccagaggggtggaggacaacataagaacagaataaactaaacttgactcatgaggatctcagaaactgaagcagcaatcacagaccctgaatatatgttatggtagtgttgcttggtgttcttgtgtgactcctgacaatgggagtgtgtgtgtgtgtgtgtgtgtgtgtgtgtgtgtgtgtgtgtgtgtgtgtgtgtgtcagggggacgggaagggtttctctgacacttttgccagcctgaaaagcagtttttcaagtattttcattaagaaaattttcatctatgttcatagggaaattagatttataattttcttctccttatgtctttatctgttttgactatcaggctaatatgactctatgaacataatctgtcatattctaagtgttccttctttcctattttatgcacagtatgagaacaattggtaattcttcactgtagagttgatggaatttagtaatgagtgcatttaggtatctaataaggatattattttcagtttaatttagagaattttcagcaatgctccagtctttctatttgttacacatttgttcaaattatctcatcttggtttaatcatggtagtttatgtgtatttgaaaagttatcctattcttacagaatattccaattgagtgaaaaatatgcatttaagtaatgccctacaatttttctgtgtttcactggtatcttgtaacacaaataataaaaatccaaagacagttattgaggtttaagctgaatatcataaaagcaaagcagccaattcactagagatctctcacctctaccataactggagcaatcctgtcctcaagatggctggaggctaattgccaggtctgagaccctgctactgtcttatctaccttctagtgctgggattaaaattgtgtaccaccaccacccagcttctacggttgatgtggctgctgggattaaaagtgtgtaccccctactgcctggcctctaaggctgtggcttgcttgacaatctgatcccgaggaaagctttattagattatatacaatgtatcaccacaatatccctattttgtctaatacaaaaagaagactacaactaatacaagaaaaacaatgtgtaataattacaataactatatacagccaagtatatcaacaatgtctagtccatttgcatttgacaaattcaaagaaaataccccattatttatcctatcttggagagtccataaggttgtacctaatttactttctattctaatttgcattatcaaattatcttttaaattttcccaaacattttcacttttcacttctttagtgcatgtcttttctgagtcttgtgtacaaggaaaaatataaccataactatctagtcttccactccttaagagaaccaagaaggaaatactattaaatgtgtaaggaggaagtacaagaaagcaactttttaaaaaatgtgagaaatgatagaaacagatggctgcctaaatagtcaccaaaagttcctctacaacattgggtcatccatcttcagcctacaggcctaacatatctgacaaacttttctgtgaagtaggatgttctgaagggctgtcaggccttgtcttggcaaggtttggcagtcactttcttttatgtcagcttgttcaatttggacagcacaccctcaggagtagaggtaaggtcacttaatttcccacaaagaaagtaaactccaagtggggtttccttgatgctcatctacttctctgaagtagattggtgctttcagtagcagacatgtttcattgttcaaaaaaatgagcctatgctattagaacatcttaaatgccatattctgtggatctcagaagtgtttgaagagcacctgtctttcaaaaatacatctctgtttgacttcaataacatagctaaaataactacaactgaaaaagaaaaaacacataatcatctcactagatgctaaaaaatcctttgacaaaatccaacacccattcatgataaagttcttgtacagatcaggaataacaggaatttacctgaacataataaaagcaatatacagtaaaccaacagccaacatcaaactaaatgtaaagaaactcaatgtgattcccctaaaatcgggaacaagataaggctgtccactctctccatacctcttcaatattgtccttaaagttctagctagggcaataagacaacagaaggagatcaaggggatacaaattggaaaggaagaagtcaaaatttcactatttgcagatatgttagtctacataagtgacccgaaaaactctaccagggaactcctactgctgataaacacattcagccaagtgtcaggatataagattaactcaaagaatcaggagccttactatatacagatgataaatgcactgagaaagaaatcagagaaacaacaccctttataatttccacaaacaacataaaataccttgagataatggtaaccaaaaaagtgaaagacctgtactcaaaataagaattttgagactttaaagaaagaaattaaagaagataccagaaaatggaaggatctcccatgttcctggataggtaggatcaaaatagtaaataaggcaatattaccaaaagcaatctacaaattcaatgcaattcccatccaaatcccagcacaattcttcacagacattggaagaataattgtcaactttatatgaaaaaaacaaaggactcaggatagccaaaacaaccctgtttaataaaggaacttctgggggcatcaccacccctgacttcaaactctattatagagctatagccttgaaaacagcttggtattggcacaaaaatagacaagtagaccaatggaaaactattgaaaaccctgatattaacccacacacctatgaacacctgatttttttcaaagaagctaaagttatacaatggaataaagaaagtatcttcaacaaatggtgctgacataactggatgctggcatatagaaaactacagatagatccatgcctatcatcatgcgcaaaacttaagtccaaatggatcagaaacctcatcataaatctaatcacactgaacctattagaagagaaagtgggaaatacccttgaacaaattggtacaggagactactaaattatatgccatcctagagccttcacccagcagctggtggaagtagaaacagacacccacagctaaacactgaactgaactggaatccagtcgcagagaaggaggggtgatgagcaaaggggtcaagaccaggctggtgaaacccacagaaacagctgacctgaacaagggggaactcttggttcccagactgatagctgggaaaccagcatgggactgatccagaccccatgaatgtgggtgtcagagaggagacctcgtaaatctgtggggctttgtgtagtggatcattacttatccctagcataggattacactttgggaacccatcccacatagaagggtactccctcagcatagactcaagggactgggcctaggccctatcccaaaggatatgacggactcttatgacccccccatggaaggcctcacccttcctggggagcagaaagtatatggtataggtatgatgttagttgggtggggcatgggaggagggtggcagagggaactgggattgaaatataaaataatcttgtttctaatttaaataaaaaatggaaagaaagaaaaaagagagaatccaaataaaaaaagaactttaaatttgcattacattgttaaatgagctgtgtaggtacaataccttgaacaatattgcaaatgtatatataatatgtttaaacaaaattaatctcaaatttgtatcaatgcaaaattgtatttgtatcaatacaaaatttgtattcaatatacaaaaatccaatccaatgcaaaatatttaaattagtagctgatttttaaaagtagattcaataatctacctttttattttatcatatctatatcctcccttttttcttttcagactacaatcaaatctacccttttagcttatcatatctgcatcttccttttatcttttcaaaacaaaaactctgaatttaatctcctctgtttaccttttccttatcattaccaataacaaattgaaccaaatctgctaaacaatgacaaatattcataacccagtgagtgactgaaaaacatccaccccacttcttgggaaggtgagcatcatgttcttatacttacttcctgttgtctgggggtgaaagcatcttaaggggatcctgaaaggaaaaaaaaagtgggctaattgtcaagtcctgagaaaggtagcagtatcatttattgcccagtctctgcataatgagaaagcacaaggcttgtctcaagtcctaggtagtagtctgtgaggctggatcatctcagcaagccacctctaaacgattataagcagtttatagcccaaagatgatctttagttggtgtttttcagctaaatggtgttaacatagtctgaatgaattgtcatgtgtggggccccaacctccttttggatacttcagaggttgttgttaggttacactgcagaaaactgatagaaactcaaacccaaaatcatgcgcataaaggtttataaaaccttttcctaagattagttattatactattgaccattaatatcatgaccaaacattgaaatcatacacattaatcttataaatttttaaataatatactttaagaaaagcttcaaagagtaaaaataaaataaaaggagtatgatattagtagcaataaagtagtcagaaatacttgtttttcttctgacaggagacagaggtttttggattttactttatcaagcattcttgaagttagataaggagagtgccataatccaactacaaagccagttttaattttaattggactacaaaagacagtttgtattatatgtatatagagaaaagaagaaaaatatttgaaaaggtttatgaaattttatactgttaaaatgtgatatgcaaggacaatttactctttttctttgatttttttttctggatgatttcattgatcaagtagtcttcagattccttagctggatatctttattctcctgaaaagacaaaagaaaaaccctttcccaaccctaattttgtggaggatttcttttgacaaattatgtcttgtcaaattgaatgcatttgctagttttataggttagtttagattaaaataccacacttcatgataaacaatcatcccttctaattaagaggtatctcttgttcaaactaattatttatcaatttgtcaatggtatccacagctttttttctcctatggaaacaaaagcaaaaccccttccccaatgtaacacatgtcctcacttccattctgggatcaacacattttaaaatgtatcagctcatttaattctttagttttttttctattatccaatgtctctccacagctgttgatttttctcattatcatttagaaaattaaaagttaataaagcactgtgaaatctattttgggaggtctttaccatccctttctgtttatttaccatacacttaaagtttcttttgatctttctataactgcctgacctgtgggattgtgtggtatacctgtaatatgctatatattacaataaccaaaaaactctttcactttcttagaaacatacgctggggcattgtctgtctttatttgtactggtatacccaagatggtcataacttctagcaaatgcatgaataccaaatcagccttttccaaattcaatgcagtcacccattgaaaacctgaataggtatcagtgctgtgtatacatattttaattttccaaattttacaaaatggaacacatccatctgctagattttattcctttgagtaccctttaagttacttactaaagttagtggagtttggttgtataaaaaaccaagtaggacattttctttataatttccatggtttgttgcctttgatggaaaagtgttttttttttcatacctttgtttttgacatggtaggattttttataaaattttgatgcttctagcacatttcatgtcaataatttatcagtttcatcattactttgtgctagaaggcctggcagacccatataggataagatgattcctattcctgattatgtccagtaactgaatatgtaataaagtcaatactgtatcatttggtataaattcagcaggttcaatgtgcaaaattactctttctgtacattgtgaatctctaactctaactatgttgagaggttccataagatcatgaacaccatgagaatagcatataattctggccttggacagaattgtaaggacttatatccactttacttatattttcagatttgtaacccactttttctgatattttgtatcagattaaaatgttggggctccagttattgatgtttcccatacaatgcaaggaaacttaattaattctgtttataaaattaattgtcttgctttggggataattgttgctaatctttccctaaaaattactacaagatctttgccagggttcactttctgcccacaatttgtcaatttcatccttattaaaagatattctaatttctactgggtctatttctgataattaatgaagtctcattttttttcttttagaatcgaatcagaagtcttttccacataagtttctaattttttacttgttttatgtgataaaaatccattccaagataatatcttccctatgcattaaaattcctgtagggtaatgcttaaagtgtaatatgaccagaatgcagttaagctttggaaccacatgatccccatgtacaaatgtaatttctcttccttcaaaaccaattctctcttagctttggaggttaattccctgggactatttaaatccttgtcaccatctaaggatatgtttcaattaatcagttaatcaggttttatcccaatagtgttctgcagatgggaaatgtcccctagtgatctttgaatgccattaagagtctgcaattgatctctcctaatttgtatctttgagggtctaattttttgtaaactattttataacctaagtaattaatagaatctcttctttgtattttttcaggagcaatttgcaatccccaacaaggcaaatttttctttacctcttcaaacattctttctaaattgtctataaatatggcttagcaaccatgaattacctaagcctaattttactgtaggaatttttctttcactttaatttataatagcttgttgcatatagtaattttttttggttttttagagacagagtttctctgtggctttggaggctatcctggaactagctcttgtagaccaggttgatcttgaactcatggagatctgcctgcctctgtctaccaagtgcatatagtagttttaattgatgtttctttcagaatttgaccatgttattattaatgcctcaatcttttgacatccctcatgataaatcttgtgaagcttggtagtcttctcatatatttactttgttatgaatatttaacagcttaatcgtgctattatggagtagttgtcccatcaatgtctacttagtgttgccccaatatcagttgtatctctaattgcatttttaatttaggggatttttgattatgattttattgacattgctttctattctttataatgaaatactttgttccatgtagcaaatgtatgatattggggatcagacatcaagctgaagttcaaaaaagcaaagcagctggacactagttaattacctctacctcagtcagaatgggctggtcctgtctccacaagctcccatcaagtctcagaccataacctcttctcaacatagctggagaatgaatgtctctctgaaaccttgcttctgtcttacatacttccgtaatattggacttaaaggcatgtatgtgagctataattctcttttagactgattaatcttgcatagatcagtaactataccatgttgtcttcagctacctaagaggcatcctatttatccaatttggacagcatgccatcagcagtcaaggcaagggcatttttgccataaagaaaataaactccatgtgagtttctctaatacccatcatcttttcttaagcagattggtgctgccagaggcagacatgtctcattgtcatagaaaacaaaaaaacaaacaaacaaacaaacaaaaaacctgttattgaatcatcttaaatgccaatggttttttttttggggggggagggtttcatgacagggtttctctgtattgctttggagcctgtcccagaattcgctctgtcgaccaggctggcctcaaactcacagagatctgcctgcctctgcctcccaagtactggggattaaaggtttacaccaccaacacccagtcaaatgccagattctttacatctctgaagtgtgaagacttcctgtctttctaaaatatatcgctgattatctttgaaagcatacccaatgtgattacagccttgattgtaatatatgacaaattattcacctatatttccttatcttatatagtttgtaataatgatttacaaggactggaaatttgtattgcattgataaatgagctgtataggtacaataacttgaacaagattaaaaacatatgtacaacatattttaccaaattaatctcaaatttctgtcaatatgcaatgaatatatacaatatacagaagtccaatacagtgtaaaacatttaaaactagtagttgctttttaaaaataggttaaataatctacattttataacatcttatgtatacttttataagtagattaaataatctacctgtttattttatatatatatatatatatatatatatatatatatatatatatatatatcttcccttttttcttttcaagagtagattcaataatgacccctttttcttacaatatctgtatccttttttgaaacaaaaaccttcaatctaaacccctttgttcaactttctttctgactataaccaacaacattttgtaaccaatcttcctaaacaatgacaaatatccataacccattgaatgaccaaaaaaaccccactccacctcttgggaatgtgagctttgtgttcttaaagttacttcctcctgtctgggggtgatgacatctttagaggatactgaaaataaaattttggattaactgtcaaactagataatttttgcccagactctgcataataggaaattgcagggcttgtctcaagtcctggctagagtagtctgtgaagctattcatctcagctagcctcctcaaaattgttctgagtagttcgtagtcaaaagctaatcattagttggaattattcagttttaacagcagtgtcacgatcctgaaaaattgtccttgtggtgctctaacaaattcctcctcctcttcctcctcctcctcctcctcctcctcctcctcctcctcctcctcttcctcttcttcttcttcttcttcttctcctcctccccctcttcctcctccccttctcctctcctcctcctcctcctcctcctcctcctcctcctcctcctccccctcctcctccttcttcctgagacaggggttctctgtatggtttaacaggtttaacaggcctggatgtcctgaaactcactttgtaggccaggctgcttctgcctctcaagtatgtgacctccaccccactcagatttaaacttcttttgggagactccaaaaatcatattaggtcagattatttcttttcttggtaatttttttctggataactctcccctcttcttttgttgcttatttgtccaatggacttaaattcttgaagatgtttgtttttattttcctggaaagacaaaaacaaaacacttccacaacctaaatttagggaggttcctaatctagtctaatcttatcaattttgatttatgacttctaaattttttatttgagcttctgaagcttttctttcatccagaacaatatgttttctttcaataggcattaggttatttaattgttctgggaaggagtttcatctattgtggcaggaaatgaatgagccagttttgtcatagggactttcaataggtccctcgaggcctttcaagtggcaatacaatagtccttaaatatttatttttcatctgttccatatcaggtggctttactaacattcgacagagattttgatttttctttaacaagcaaacttgggtttagagaaggagggagccacactccaactccaaagccagtccaactttaattggactgggactacaaaggaaccatttgcattgtatgtctgtaaagaagagcagaaacaaacatttgggaagaattatgaaattttacactgttgtaaatgtaatataacaataaacaaatttattcctcttcttgggacaaattttctcgattatttgccccttttctttggatgtaacaattttctagtggggtcggattccttagctggctccctttattctccaggaaagacaaaaataaatccttccccaatcctaaatttttggggaggttctcctttagcaagttatatctgatcaaataaaaaacatttgttaggtttataggttatgttaggtttggttaggttagattgaacgactacactgcttgatgaacttaattaacttctaatttaaaggtgtcttgttcaaatggaatatttaccaattgtgatgatatccatagcttttcttcacctgtggaaacaaaagcaaaacctcttccccaacataacacatgtcctggcttccaattggaagtttatcagttgatataattttgtaggttttttctattatccattgtctctccacagctgttgttcctttctcattagcattaagaaaattcaaagttaataaagcactatgcaatctattttgggggttctttatcatccctttctgtttatttagcatttcctttagactttaatttgaactttctaaacctgcctgccctgtatgattgtgtggtatatctgtaatatgctttatattgtaataggcaaaaactctcactttcttagagacatatgctgaagtattgtctgtctttatttatgtatacacatgatggccatgatttctaacaaatatataattactgaatcagccttttccaaactcaaagcagttgcccactgaaaacctgaataggtatcaatgtgtatagtgcatattttaattttccaaattctaccagatggagcacatccatttgccagatttcattcctttgagtttcctttgagtttcttgtggagtttatggaatttagctgtataaagaacaagtaggacatttccttagctgtttgccatgtgatataaaattcttttcaaacctttgatattaacatggtgttatttatgaaattctgagttctttagcacattttctataaagagttgatcaattttattattaccttgtgctagaggtcctggaagacccatatgggatcagatgtgtgttatatataggagatgattcctgtccctgactatgtcttataactgaataaataacgaagtcaattcagtatcatctggtataaattcagtagtttcaatatgtagaacaattctttctgcatattgtgaatcagtaactatgttgaggggtttcttatgattcattaacaccatgagaatagcatataattctgacttttggacaagaaagtttatcttttagataaactttatattattttctgatatataacctgcctttcctgatttatttgcatcagtatagaatgtagttgctccagttattggtgttttccttactatgtgaggaaggatccaattagttctatttatatgtttaattctcttgctttttgcataattgttgttaacctctctcaaaacaaactaccacaagctcttcgacaatgtttactgtctaccctataatttgtcaatttcatcaatagtataaggcactacaatttctgctggatctgtttctgctaatttacaaagtcccaattttccttttagaatcaactcagatcttttctacataagtttttaattttttttacccagtttatgtggtaaaaagatccattctataatagcatcttccctctgcattaaaattcatgtaggagaatgcttagtgggtaatatgaacagaatgcagttaaactttggatctatatgatccacatgtgcaatctgtaattactcttccactaatgtcaattttcttgaagcttcagctgtcaattccctagaactatttaagttcatgtcaccatctaagatttgtttcaattaatcagtttatcaggttttattccaataatgtgccatagatgggaaatgtctcctagaaatctttgaaaatcattaagagtcttcaattgatctctcctagtttgtaacttttggggtctattttttgtaaatctattttatagcataagtaattaatagaatcttctctttttattttttcaggggcaatctgtaatgcccaagacagcaaaattttctctacttcttcaaacattctttctaaattatctagatttgaagcaaataataaaatatcatccatacaatgataaactatagattgagaaaattgctaatgtgtttttcccaatggctgctgtacaaagttttggcacagggtgggactatttaacattccctgtgggagaaccttccactgatatctcttaaaaggctgtgaattattataggtaggcattgtgaaggcaagtttttctctgtctttttcttgtaatggtatacaaaagaaacaatcttttaaatcaataactgagaagctatgctttaggcaatggagaaggcaaaagaattccagactagagtgagcccattggctgtatcaccttactaacagttcttaaatcttaaattctccattttcctgatttcattttaataacaaatataggagtatcccagagctggtttattcctcaatatgctgagcatttagttgctcctataccagctcttctaaagactgcagtttttctgtggctaaaggccattgtacaactcatacagtttagtctctcagcctttttaaaagtagagctcctattgtctttgaaagattatcagctgttgtgtcctgttcttgtacaacatgagtggtgcgtgtttgctctctataataccctcttataaattcttccaaaaccatatgttaatttatgtttggtttcattgcaatattagcaacatatgactttagtattcctctgtgttctggccctatacactggaaccatctcatgttctgttttacctgataaagttccaatccctaagagttgaacatttacctcctgaaaaggccaattagaatgccaagattcttttcttttttaaaaaattgggatcagtttttatttctacaaacaaaaaacatataccacaaatattgaagctggtagtgctttccaaactttgatacaaatattaattacaggggaattttgttaaatgttgggctggatagttttatgtcaacttgaaacaggctaaagtcatcagagaggagggacattgaggaaatgtgttgataaggtcatctgtagatgagcctgtagctcattttctcaattagagattaataggggaggaccagacattgtgcgtggggccatccctggactggtggtggtcctgggctctgtaagaaagcaggctgagcaagtaatggaaagcaagtcagtaagcagcacctctccttggcttcaggatcatcttgtgcctccaggctcctgccctgcttgagttcctgccctgacttccttctgtggtctactgtggcagaatgtaagcccagtaagccctttcctcctcagcttgctttggtggtggcatttcctcaaagcaatagaaacccagactaagatgaatgtagattccaattcattgaatactggctggagaccgagtctctgtccccttatcagctctcagctgacaccactgggaatgccaagattcttgtgatataattgttatattgcatctgtgtctaccaaacctgcaaggataacatcattcattcatacttttaattttggtatctgctcatttatagacatttgccaatatactcactttgtgattttttcctcaattttttgttctctctttcatagttcttctattatccagagcagtatgttttcttacactatgtattaggcactttaattggtctaggtagtggtttccatggtgacaggaaagaattgaactgaatttctcatacacttttgcatagggtcttcgagaggccccctcagataatttccagatggctgcaaaggattacctttgtgatctctcatcaacctacatcccattgtccaatgtttgcctttgccacaccatttgcacaatccagaaaggagggtgacattctgtttggattgtagttataaaaagaactctttctagaaatgctttgcttacaatcccttctcatgtgaccttaatgccacaatgaaaacatttgacattttgatttttctttaactctcctgaaatcagctctcctgtatgtaccttcatcatagcatgaacttccatgttaatttcatctctggtacaatcctctaaaggcgctaattttgcttttgcattgggcattagcattctcataatccattgattcaatcattatttttctagaatctgagtctgatatcattcaatttaaggctaataaccatctttgtaacaagtctgtgaatacttcctttgggccttataaaacttttgtaaatggttctattttctttcctgcttctccagttctgttccaagcatccaaagctgctgcatatattatacccaggaaattatcatcagatagacattgcctttctaaagtagtataatctccttatccaagaatttgatcttgggagagatctctatctctagctttgggctggatagttttatgtcaacttgaaacaggctaaagtcatcagtgaggagggactcctccctaagtatatgaacaaaaggggatatgccttttgttcatatccttagactcttctctgaaccaggaagtacattgtaattgtggtccaggctctaggacagctttaatcaaatcattccaatctacagggataaccctattacaaacagatcatgtgtttatcatctgctacacaaatggtgaatggactccatctgagactacagctttcttgaatttccctaaatctaacattgtcacaggctttcaagtagctcttttagaatctccttcattttgcacttccaataatgttattggatatattaaaggtgattctcttaagaccttagagttctcctttttaaccagtaaatgcaatgctgaatttgttgctccatttaatttttcaatctgggtttgagtatctctataatctgttttaataggtttttataaggtctgcatcttggcactcatatcaaccaacattttcagagataaaccaagaattatcagaacaataaagataatgaaaataacaatagtgtaacaaacccagttaagatgattatcccttcacattcaatctttaagccatctattatgtaatcatatgaatatctaattttttcattttgatagagtttccatttattagtgtggggtgaaatctctgtcttttaactaatccctttctttaagaatttccattaaacttaccaaatctgcctacaatgtcagcgaactgtaaggcatgtctgaattgaagaagtaacttgtggcattgagctgcgagttacagcctgaagagaggctctagaaaaaacctgaaatcctcctgagtttgagtggcagctaagactatttagaaaagtacaactgaaaaatcccacacttgctgaaagatttgaggaaaaacaatagaaaacctagctgtcctggtagggactcaggaaggagagactcaggtgggagtcccacctgctgctcagacttgggccaggcctggtcccttggcctcaaaagaagcttttctttgaattcttactttaatactggttgccaatttttaacacaagtaataaatgaccagacactgatattggggttcaaacttcaagctgaagttcagaaaagcaaagctgaatggctgaatgggctaatactgtctccatgagctttcaccaagcctcagactgtaagctctcctcaatgtggctggagaatgaatccctctctgagaccttgcttctgttttatacacttccataatgttaagggtgtgggctataattctcttttagactgattcactcttgtatagatctgggtgtcattgaactcacagacatccatccatctctttatcctgagtccaagaattacaggtatataccaccacctactagcctctggctgttgggattaaagtgtgagcctgatttctataccttgttgctgactttgtttgctgaatctgcaggcaagctttaataaatcataaataatatatcactacacacctcattaaaatgcaatgtaattttaaaatataactaaataatcactgtaatagttaaacttagtcatattaggtatgctttcaactttcaatgttaaacagatatatttaaatatagatgctcttcaaacacttcaaagatctatataatatgctatttaatgtttaataacctaagccttttcatgacagtgggacacatcagctcctgacagcaccaacatacttcaaaagagtatgatgtgtatcagagaaactctgtatggagtttgctttcttataggcaaaagctagccaatggggaagaaagtgcccattcctccaactgctgacagtatactgtccaaactgaaccagcaggaagtgaaagcaatggctaaactttgctaagagaagaaagtgcaatccttcaaatttccttgctatgcaaaaatatctgtcagatatattaggcctgtagcccaaaggtgcatgtcccaacattacagaagaaatttgggtgactgcccaggtagcctgatgctcctgtcattacataaaattacccctgatggaggctttcatgtaattaaatactaaataattagacttaaaaattttcttagtgaatttaaaagggtaaattgcatataaaacttcagactcatgaagataagatacatacaattttctctgaatttgcaaaatacaaatggattggatattgtcattataattttagttgataactgttttgttgcatataattttactatgttgatgttaaaaccttcttttttatttaaacaaaaagggggaaatttggaatattcctttatactgtgtgaatatatgtcactctgattggttttaataaaagagctgactggtcaataatcaagcaggaaaaaattaagctaagtgtgaaagccaaactgagaaaatgctgtaaagaagaagggctgaatctgggagtcaggaacagacacagagagaagtaagatggacatgccatgacaaggaaaggtatcaagctatgtgacaaagggtaagaaatataggctaatttaaaatataagaattatctagtaacaggcctgagccactgggtgaaaagtttaaattaatattaagcctctgtgtcattacttgggagtggctggtgagctaaaaattttgcctacggtttttgtgccaatgccgtacagtttaatttactatagcactgtagtacaatttgaggttagatttggtaataccagagcagctcttttatttttaactatcctggttttaactatcctgttctttcttttctctctgtctctgtctgtctctgtctgtctctgtctgtctctgtctgtctctgtctctgtctgtctctgtctgtctctgtctgtctctgtctctctctgtctctgtctgtctgtctgtctgtctgtctgtctgtctctctctctctctctctttctctctctctctctcatagttatgtaagatatcatatgtgtgtgtgtgtatgtctgcgattctctatatgaagctcaaaacagtcctttcaagatctgttaagaattgtgttggaattttggtaggacttgcattgaatttttagactgctctggtaggatggtcattttactatgttagttctactaatccatgtatatcagagatctttctgtcttctggtattttctttatttctttattcaaagtcttaatgtttctatcatacaagactttcacttgtttggttagaggtaagataagacttttttaaagctatggtgaaaggttttttttccctgtattctttctcagtccatttgtcatttgtttatgaagtgtttcctgaaagtatttatcagatatagaagtttcccagatagttatgtaagctatcatatgcaaataaagatagtttggcttcttctcttcctatttgttaccactctccctgcccaccgctgccaccattgtatccaaatgatcccttccatcttatggctttatggctcaagctaagactctagtgctacacttaataggaatggaaagagagtacaaccttgttctgttccttatttcaatgaacttgctttgagattctatctacttgagttgatgtttgctatggtcttgctgtaaactgcctttataatgttgaggtatgtctttgcatccccaatcactccaggacttttatcatgcatggggtttggattttgtcaaaggtattttctccatctaataagatgatcatctggtttttatctttcagcccattcatatgttgcattcatcgtgtgtgatagatcattcctgtatctctggaatgagtcctacttggtgatggtagatgatttttaatatgtttttatttaaattagaaaaatattattttatatatcactcctggttccctctccctcccatcctcctatgctccccaccaacccccatcccatccctcttcttctccatagaaaggatgaggccttccgctggggatcatgagtctgtcacatcatttgccacagggcctagaccctcccccatgtgtctagtctgagagtatccttcggtggggaatgggacacaatatacatttgtacactagggataaatgctgttccactaccagaggcctcaaagacttcccaggtctcctaactgatacccacattcagggggcctgggtctgtcctgtgctggtttctgagctgtcagtctgggctccatgagctcccctttgttcaggtcagctgtttctgtgggtttccccagcctagtcttgacccctttgctcatccctcctccctctctgcacctggattccaagaatttgacttggtaattagctgtggatctctgcttctgcttccatcagttcctggattaaggctctaggatggcacataagggagtcatcaatcttattatagagaaaggtcatttaagttagcctcttcactattgcttagaaacttaggtagaggtcaccctactgccagattattctttaaacctataatggctccctctattgcagtgtctcttttcttgctcccctctattcttcccctgactcaatcttcctggtccctcacgtcttcctcccatgcccttttctccacttccctttctcctaactccctctcccctccagccatgctcccaatttactcaggagatcttgtccctttcccttctctgggggaccatgtatgcttcctagggtcctccttgtttcctagcttctttgttggtgtaggctgtaggctggtaacactttgctccatatcaaatatctatatatgagtgagtacataccatatttgccttattgtgactataagggttttctcactcagggtggtttcttctagttccacccatttgcctgggaattttttgatgtattcttggattcagtttgaaactattttattgaggattttttttgcatctgtgttcataagggaaattttttctataagtcattttctttgttggatctttatgtgatttagatattagatattagatgtttggtttctattttgtggaataatttgaatattattggagttaatgcttctttggaactcttgtagaattctgtctaaaaccatgtgatcaagggatttttgttgttgatgttgggagactttgaattattgctcctgtttcactgggagttacaggtctgtttaaattgctcatctgatcttgatttaattttggtaagtagtatgtattaagaaaattatccatttcttttagattatttcagcataggtttataaagtatgtccttatggttcatggatttgcttggtatctgttgttatatctccccttttatttctaatttattactttagattttctctctctgccttttagttaatttgacaatgggtttgtctatcttactgcttttctcaaagaaccaactcattgcttcattgcttatttgtattgtttttgttgtacttctattttattgatttcagctccaagtttaattattttttgacccctctacttctttggagtgtgacttcttcttgttctagagctttcaagtgtgttaataacttactaatgtgagatctctccaaatttttatgtattcacttagtgctatgaactaaatagatccatatttatcatcctgcacaaaactcaagttcaagtagattatgacctcaacttaaaaccaaacacactgaacctgacaaaagagaaagcagtaacagcattgaatttacaggcacaggagacaactttctgaatggaacatgaatagcacagggactaagataagcattcagttaatggtacttcatcaaactgaaatgaaaaacatagaaaagaagaaatatctcatgaaaacccccatgagaaaaggcaaaggacactatcggtcagacaaagagtcagcttacagaaaagatttttataaaacccatgtcctgtaacgatcaaataagcaaaatatatgaactcaagaattagatatcaaaaacaaataatctaacttttaaaatgtggtatagaactaagtagagaattctcaatagaagaatcttttatgatcttctttagagatagtttcttttttaatttaaattagaaatagtcttattttacatatcaatcccagttccctatccctcccatcctcccatgctcccccatcccatcccctttatgctcccagggagtgtgaggctttccatgggggatcacttaaatgaatgagaaacacttaaagaaatgttcaacatccttagccatcagagaaatgcaaatcaaaacagctgtgagattccattttgcacctgttagaatggctaagttgaataacaccagcaaaagcccatgttgtaaaggatgtggggcaaaggggaaacttctctattgctggtgagagcacaaacttgaacaaccagtgtaggaatcaatatggcagatcctcagaaaattgggaatggatttacctcaagacctagctatacacactcttgggcatatacgcaaaggatgcttcatcctacctgtttgtttcgattttattcataatatctagaaattggaagcaatttagatttcccttaactgaagaatgaataaagaaaatgtgacgcattttcacaataaagtattaactagctttcatgaaatttgaagacaactagatggaactagaaaaaatcatcatgagtgaggtaacccagactcagaaagacaactatggtatgtaatcacttataagtgaatattttctgttaagtaaatgataatcaagctacaatccatagccccagggaggttaggtgaagagtagcactctaagggggaggaacccatggacctccttgggaagaagaaataggattgattgattgattgattgattgattgattgattttttgggtcagcttgggatatgggtacatgaatgagaggtatcaggtaggatggagggatggagccagattttgaagaaagacaatttgaatggtgcgagtcagagggtggtgtgaaaatacaatgcagtgaaattttcctggaatatatgcaggagaaactagtgaggactcctagaaatgggggatatggagtctgaactgaccatcttttgtagccagacaaggcttccagtgttgggactgggttgtatttgtttggattgtttgccaagaggggtcctaggcagatccattaaataacatgagctgataataagtcaaaagattactctctgaaaaactgacagtggggccccgttgccaaggaaaatgtctacacagttcattgatcatagagaggtcaagctggtaccttcatggagcctacacccctaatttctaggataagaaagtactccacaggataccaaagagaaacatgagcaccaaccccaccacaaaaaccttgacctgcctgtcctgcaagatgtgcaggagcaacagtggtgtagaacttgtgggaatagccaacaaatatttgatttaatctgaggccaacaccacaagagggagccagtgcgcttcactgcctggatggtgataactagggactggatattggataacccagagacctagggtagaagcaaacaccactgggggtaggaaggatacatgaaataattcctaataatattctgctattcttatagattgctgtcttgtccagtggtcattagaaaggcttcttctggcagcagatgggagtagatgcaaagacccacagccagacattatacagaaagagaatttaaatttgaaatctccatcagacccccccactggagggacctcagagaaccccttgttagagaggaaggaaatactgtaggaatcagaggggatggaggtcatcagaacaacatggagagtgctgctgactgtcttgttctcttcatgccttgctcagcctgctttcttatagaacccagggctactagtccgggaatgtcaccacataccatgggctggaccctctcccattcatcactaattgagaaactgtcttccagatggctctcatgaagacacttcctcaaatgaggctccttcctctatgatccactaacttgtgtcaagttgacacacaaacctaatcagtgcaccaagtatgacatcagttttggagaaagttccatgagatgctgagaaggtatattcttttttgtttgtgtgatgttctgtaaatatctggtaggttcattttgtttataatgtctgttagatttctctgcttccttttgttctgggtagcttatctatttgcaagagtggtatattcaaatcttccactaacactgtgtgagggctaatatgtgatttaggctgtactagaagtgtttcttttatgaaaattaagggcccctctgtttgatgaatagatgataagaattatgaagtcatcttgatggattttttcttagattaatatttaatctccttccctatctgttttgcttcattttgcttttaagcctttttttggtcagatattaaaatggatacactggctttcttcttaggtctatttgcttggaatatctttttccatccttctacctttaactgaggtctatcctttatgttcaagtgtgtttcttgatcagaacagaaaaaatggatcctgttttcatatccattctgttattaagtatctttttattggaaattgggaccactgatgttgagtgttatcagtaagtagtgtttctccttttttgttatgggtgttgtgttcccccttcttagaattgcttatctgctattatttattcattgtattttcttatgtgtggttaacctcttcagactgtaatttccttttagccacttcagtggtcttggatttatagatagattgcttaaatttgcttttatcttggaatgtcttgcttctccatctattgtgattgaaagtttttcttggtattgtagtctatctgttgtcttctgtcctttacactctacaggacatctgtccaggtctttctggcttttggactctccacttaatagctgcatgttatcctaataaatttgtcttatgtattatttttcccttgaagtttttaatattctttgttttgtacattttatgttttgattattatgtgccatgggaatttcttttcagtttcagttttttatctttttaaaattattttatataccaaccagtttcctctccctcccaccagctccttcctactcccatccactcctcctccatctccacttagatgtggttaggccttccactggaatcaacaaagcatggcatatcaagctgaggcaggaccaagatcttccccacttcatcaaggctgaagaaggcatctgaccatagggaatagattccaaagagccagctcatgcacccaataaaagaccaagctacacgattgtcaccaagatgttcatacagagtctgtgagttcccacaagttcaggtagtctgtctcagcattttaattaaatggaattccatcctttccactttccctttcttccctctggcacccctatgctctcccactctcaaattgatagcctcctctgtctctctccgcctctctatacatatgtatacatatatactgtatataatatatatacacatatttatatacacatatatacattatatatgcacaaatagataaatatgaactgttgagtttgttttgtttttgtgtttgtatgatttcaggaaatatcaataaggtacccatctctcaaagagctctattcttcctttcccagcaatctttagttgcctatagttctttgtttaggggtgggagcctgtgaaaaactcccccttctaagtcttgatactgaccatgttttgatcttatttatgtaaccatttctaggagagacagtttcacagtaaacttcctgatattcttaacccaccccaaccccattatgtttcttgacctgtacatacaggatgtgtatgccatgtagatgtatccatcatcatcttcacaaaaatgaaaaaaaaaactccaaaatatttgttaggctaaagagatggatctccagttaaaagagctcttgctgttcttgcagagaacctgggtatcgttcccagcatccacgccatgaggttcgcaaacacatgtaactccatttctagggaatctcaatcctttactagcctgcatagctatcagctatgctcatgatgcacattcataagcaagcactcacacatacataagaagtaaatgaatatttaaaaattatgtagacccataaaaaacaatggaaaatcaaaacaattctgaagaaaaataatgtgccaggaagtattatcattatttaatttcaaattataatacagaaccatagtaacataaacagaaaagtactgaaacaaaagcagacacataaatcaaccaattaggatttggaaacccacatataagtacacacaacttcagctgtcttgatttttgatgaagatgccaaaaaatacacacaacaaaaagaactggatttcattacatacaaaataaaattaggttcttatcactcactgtgcacaaaaatcaaccctaactggatcaaagatctcaaatcatgacctaatgccttaaaaccagtagagggaaaagtagggagcaggcttcaacttacatacacaggtagggatgttctgaagaagagtctgacaccacaggaaataagacaaacatagggaatgacattcaactgaggcaagtgtttgtacaaaatctgtgtagatactatacactgatgtcagaaactgaaggagttgggagaaaagaggaagataggaactgtgagatacaattaggcacaagatcacataatacagtatttactttttaaattaaatgttaaagtaagtatagataataatcactatataatataaatgcctaattataatttctattatttaaaataaaatattttattaatcacataaaacacacttctattttatatgcagtcatatgttgctttgactattattcttctttatcttaactgtcagaaattgcttaacagtttggtaaaatctcagtgtcctctttctgtttctattatcaaaagtctgaatttatgtgtattataaagaaagtagaatttttagtttataattttggagatgtaagagtattgcaaagatattgcctcagcactgagggcttaatagtagttggcctttcaatggtagaatagaaactcaagacatcatttgatgaaacaggaagcaagaggttgcaggttcaattcccagaatgtaactgctgacttacaaccatctataattccagttctaacaccatctaccaccctgttttggcatcagacacacatgtggtgccctaaatgctcaaagacaaaagatgcattcacataagagaaatactagttgtctctaatgaacactctttggttgaaattcccatctctagaataccatgtcagtaaacataagcataggactcctaataaatgacaagactgtggataatgtaattaattgtatatacggaaacagtatcttgtacttaatatttaagaatgactgcaacaaaacttaatattttcttaaatttatttattatgtatacagtgttctgcctgcatgtatgactgcacactagaaaagggcaccagatctcattaaagatggttgtgagccatcatgtggttgctggaaattgaactcagaacttctggaagaacagccagtgctcccaacctctgagccgtctttccattccctcaaacaacttttaaatagtatttaaaaaattggaaggtttcaaatgataatttcattagggagggaaaaattatttccattgtgtgtctaaaacacatcctttgcattcttcactgcacaaattttatgatgtttctagatacaaatacaggcatcaatagcttcttaaacatcaaagaaatatacctataccaaagcactgtatttgtggaggaagaaaggagtggaagacatttggagtaaaacagaaaggagaaagggttcagagaaagacaggaagcagagaaggaatgagacccatttcatggaaggcacaacagtgtttaatgtgtatggattgaatatattgcttattccaaaacagcaagcatagggaagtggaacaacttttcagctgttaatagactgtgaaatcctcattgtttttgacaacagaattgccttactcatacaagtgttttatggatgccattaaattagaattaagaatatctgaattttcttgtgttggactcagctcactttggaatagaaaagaaattaaaatttgagaatgtaggggctccatttaaaatttctctgaagaaatcccaaaacaccatggcttatggcacttgacaagttcaatatgttctcagttttataaatactatgtgagattatcagatgagggttaagaggctatggaaatcttaatcttttaaattgaaataggacaatctttctcaaacaggccattggagaaatttgaaccaaagctcttgccaaggagagaaaaaaaaatgaagcagagagggaaggtcataccctgccaacttgaatgttgtgtgaagccataatgttccttatagtttgacagtagtgatatttattctagtctgtgtcagttgaacacaaggaaataagcattcctaggtttcccttcaggctgcatgtgacataaactacaggtgtctcatagcacatcttgttattcagggctgaaaagtctccaggagttcgtcaaaaggtatccccactcctttctgagcaattgcctccatcatactgggttgtgggtatgtctgtgggggcattttcattcttctcttttattaaagggttctaatagaatatatttttatcatgttttcctctttcctagttcctccaagatcttaccacctccctgcctactcagttttataatattattcttcccttcatcccttaaaaaaaagcaaaaacaaaacaaaacaaaacaaaacaaaaacaaaacccagacaaatgaaaataaaaacaagcaaggtaaaaacccacaagaaaaaaaatgcccaaagtaaaacaaaacaaagtccatgaaaatgccattgagatggcccctatttctaaacctttgttgtgaaattacaaaaatttccatcttaacaattccaggattcagagtttccctgcatttctttctgcattgcgttctagagctttcagttgtgctgttaattctttagtgtggctgttctctagtttcttcatgtggactagcatgctttaaaagtgtcccattagtttgggtatgttgttttcacattctcattgaattctaggaaatttttaatttctttttttatttcttccttgacccagggatggtgcaactgggcactaatcagtttccatgagtttgtaggttttctgctatttgtgttgttgttgaattctaactttaaagcatggtggtctgatgagataccgggggttatttaattttttagtacctcttgaggtttctatggtgcccagtatgtggtcgattttagagaaggttccatgtggcactgagaataaggtatattcttttgtgtttggatggaatgttctgtagacatctgttaaacccaattgggttataacttctattagttcctttgtttctatgataagtttctgtctggtgttcctgtctagtggtgagagtaggatattgaagtctcccactataagtgtgtgaggttttatgtatgactggaattttagtagtgtttcatttatgaatgtggatgcctttgtatttggggtatagatactcagaattgagacttcatcttgatgtatttctcctgtgatgagtaggaagtgaccaccttcatctcttttgattgattttagttgaaaatctaacttattagatattaggattgcaaccccttcttgtttcttgggactttttgattggaaaatcttttcccacccctttactgtgaggtattgtctgtctttgaagttgaggtgtgtttcttgtataaagcagaaggatggattctgtcttcatatgcattctactagcctgtgtctttttataggtgaggtaagacacttaacattgagggacattaatgatcattgattgttcattcttgttcgttttggattaggtggtggtggaattgtgcgtggatttacaccccacttttctttggctgtttgtaaagtgggattatttattggctatgtttttctggttgtggttaacttccttgggttgcagttttcctttcagaactttctgtagggctggattgatagatatgtattatttaaatctggttttgtcatggaatatcttgttttctccatctttactgattgaaagtttttctgggtctagtagtctgggttggcatccatggtcttttagtgtaggtcaaatatctattcaggaccttctggctttcagagtttctatggaaaaatctgaagtaattctaataggtttcactttgtatgttagttgccctttttccttttctgctcttaatattttttctttattctgtatgtttggggttttgattattatgtggcacggagactttttgtggtccactctatttctgttctgtaggcttcttgtactttcattggcatgtctttctttaggttgggaaagttttcttctatgattttgttgaatatgtttctgcacctttgagttgggtttcttcaccttcttctgtaccttattgtccctaggtttagtcttttcacagtgtccatgtttcctgtatattttgtgttagggatttgttggacttaagattttcttaggttgatgagtccatttctcctagtgtatcttcatctcctgagcttctctcttctatctcttgtattctgttggttaggctttcatctgtagttcctgtttgtttactcaacttttctatttccagcattcccttggtttgtgttttctttacagtctctatttcagctttcaggtcttgaactgtcttaattatttccttcagctgttggtattttcttgactttccttaagatatttgttgatttctagtatttttggggtgtgtgtgtgtgtgtgtgtgtgtgtgtgtgtgtgtgtgtgtgtgtgtgtatcagttatctatgtgttttgtaacatatttcatgtcaaattaaactgcatcatagactaaactggctatagtcctgaaaatagttgggtactagaacaaaaatagacaatggaatcaaattgaaaaccctgatgctaaaccacaaacctacaaacacccggtttttgacaaagaaactaaaaatatacaatgaaataaagaaagcatcttcaaaaaatggtgcttgcataactggatgctggcatgtagaagactgcagatagatctatgtgtatcaccatgcataaaacttaagtacaaatggatcaaagacttcaacataaatccagccacacttgtgttatgataaatctttctgccaaaagcagttgagccccactgccatgtgtttgctttatgccagctgcccacccgagttagggcacaaattaatgcacagagagacttgtattaggtacaatgcttcttggccaataattaggattctcatctgttagctcagtctcaattatcatacatctatatattttataagacttatcttattggacgccttattggtgtccctccttgccggtggatcacattgcactgctgaaggaagagcaggaggggacaagaggaacacttccagtttcctttgcttaaatatgagtctccttgctatgtcacttcctgcctggaacaccacttctctactgcatttcccagaatcctctttgactcctagtcctgcctaacttgttgctgccattggccaaacagtattttattcaacaatcaataagataaatatacacaaaagtacattccccatcaacactgtacctcttagaagagtaaaggggaagtaccctgaaggaattgatacaggagacagcttcctgaccattaaacctgtaagcacagacacttagatcaacaattaataaatggggtacagaactaaatagagaattctcaacagaggaatctaaaatggctgaaagacacataagaaagtgctcaacatccttagccatcagggaaatgcaactcaaaaccactctgagataccatcttactccagtcataatggctaaaatcaaaaacaccagtgacagtttatgctggaggggatgtggagaaaggggaatactccgccactgctggagggagtgaaaactcctacaatctctttggaaatcaatatggaaaatgggaatcagcctatcacaagatccagcaattccattcttaggaatatacccaaaagaagcacattcatacaacaaggatatctgttcaagtatgttcatagcagcattatttgtaatagcaagaatctaagcaacttaaatgcctctcactgaagaatgaatacagaaaatgtggtacatttacacaatggagtgctactcagaagaaaaaagaaacaatggaatcttgaaattctcaggcaaatggatagaactagaagaaatcattctgggcgaggtaacgcagtcacaaaaagacaaacatgatatgcactcactcatatatggattttacacatagagcaaaggattaccagcctataatccacatcaccagagaagctaggcaacaaggactataaaagagacatacatggtcccctggagaatgggaaagggccaagatctcctgagcaaattgggagcatgaggagaggagaggaaagagggtgctaggagaatgagaagggaagaagaggagggatgaggaggatataagggagcaggtgttgcgtgtttggcacaattgaactttgagactgaacttcagtgcctcatgtcctaggtcaggcagcctgatggtctgcctgacatgctgtaggaaccatttttagttgactggttacgcaagaaaatagtcactgactgcttcatctcctttggcttacttggaaatatagttacaatgtttaactggcctggattaatagagttgaaattttatttttaagaattaacaaggtgacttccacttaattcattaccatttattttattgaaatgaactaactgaagaaaagatccttggaaggaagtggtcataacattaaagagattttctttcatttaaactacattactatgtgatgttggtctatattgtttctgtatatttgtcatgattgtgcttgtatcctatttggtgtacttaccaaataaactttccagtttcaacaaacaaatggaatgttttatttcatttatatcctgaaatttccattgcactttaacaatggtgttggcaactgttttgttgatagaagttttttttcttaactgccctgaacttatagttaggaacatttagtttgcttatgttggacttagctgaataattgaatagatcaagtgtaaggaaggcattgaccttgctctcagcatggtgctcagtgatgacctacaccaggcagtttttctgaggaataaacaagcaattatttcgcaattttatgtcactaaatttttattctgatatatgaatttgagattttgccatgcaaatttgagaaagttgtggatatttgtctctttcaagttggcataggcagtgtgaaatgagtaaccatgccactaagaaatgtaagattaaaactctaggccactggaaaattaacaactgacaattcaagaacaacagtggcaccaactgcaaagttatataagacagcaatgtcacccaacaatcaatatttactctaccatttccaagtatcccatggttatataaccatatgttttgttcaagcacacacccgtccaaaacgacacgtgtctcactgcattccctcttcttcacagctggcaaaactctcaagcaatcaaagaagaatctcagttaccacttccttccctcatttttgaaacttcaaaaattgttctctttggtagcacctcaggtggctactgaaacatcaaaatgtggcaggtttaagttgagatgtgctctaaggttaaacaaaagcaccgtatttaaataaaaacattttatggaaaaataatgtagactgttgtaatacattataacaatcaatgttgaaatggcacactatataaaataggttaaataaatgcagtgttatatgtttaaaatataaaatttctagccttttattagaaataatgctgttatgagcatagttgaatttgtgtccttattgtatgaatgtgcattctttgggtatatgcccgagaggaattgccaaatcttgaggaagaatgattcccattttcattagaaaccaccatactcatttccaaagtgtttgtacaagtttgcactcccaccagcaatggaggagtgttcctctttctccacttcttctccagcataaactgtcattggtgttttttttttattttattttagccattctgacaggagtaagatggtatctcagagttgttttgagttgcatttccctgatggctaagaatgttgaacacattcttaagtgtctttcagccattttaacagccattctctgttgagaattttttatttaattctgcactccactttctaattgcattgtttggtgttttgagttcattgtatattttggaaatcagccctctgtcagatgtggggttggtagaacctggaagcaacctagatgtccctcaactgaagaatggataaagaaaatatggtacatttatacaatggagtactactcagcaggaaaaaaacaatggaatcttgaaattctcaggcaaatggatcaaattagaagaaaccatcctggccacaaaaagacaaacatggtatgtactcactcatatatagtttttagcctacaatccacaccaccagaggaactaggaaagaaggaggaccccaagagaagattgcatagtccctcaaagaaggggagggggagaagaacccctgagcaaattgggagcatggggggaggaaggaggtaggaaggggagaacgggagaaggggaggaaaatgagaacaagaagactgtgacaggggaggaatagatttggtctagaaaggagatgtcttgatagagggagacagtatgggtttggagagaggtctggcacaggggaaattttaaaggatccacagggatgactccaactaataatctaggcagtggtggaggggctacctttgatgcccttcccctataatgagactgatgactaccttggttaccattcctagagtctttattcagtagctgattgaaacagaaacaggcacccacagatcagcatgaaccatactcctggaatcccattgtggagagggaggaaggatgaacaaaggagtcaagatggtgctggagaaacctgtagaaacagttgacctgacctagtgagagcacagagaccctagtggtaaatcgggggaaccagctttggaaggaaacaagatctctgaatctgggagccagctaggaggccaagacagtctatgggacttctaacagtggagccagtctttatccctagagcacaaatggattgtgggagcccattccctatggaggaatactattgcagcccagatacaacaaggagggcctaggccctctcccaaatgatatgacagactttgatggtcccctgtggagggcctcattatccctgaggagaaggtaggggtgggttggggggtcttggtgaggaacatgggaggatgggagggtgagggaatggggggatggatgtgtaaatatgagttcctctaaaataaagaaataaaaataaatttacaaaaagatataaagtaaaaaaaaaaatctagcctttaatgagtgaaacaagaatgcacccagaaggaagactttggtgctctctgcagcagggagcctgtgctatgcaaatgcctctaatttaagtgctcagcttttgagagtggtcctccatttctctttgagtgatcagcagaggaaatgttcatctgggagattgggaattaccggggacccagaatctccttctaccatacattgaattgtaagattcggtatattttagatcgctgttaatcagcatagtcattgttttgctttgagaagaattgtatttggagagggcacttttctcctgagatgaacttatcagagccctgaactactgtgttttttgatgtagaaatgactatgagatacttgaggaaagacagtaaatgaagaaagaggatggggcagggagaaagagtagcaaatggaattgtgtaactcagggtaaagttttacctaagtctgtttttcactaatcggatcccacagacaaagtgaattatgaagcaagaagtttttccttccatggttacaggccaggagttcacaggctggatatttctattttattttattatttatttgtgtttttgccagtggctaaggactctaaacagaggcagcacaaacaccccatagtaagaagaatgtttgccaggaacagatccaattgagatcattgtgaggagtccacagtaaagataatcattaacccacaaattcatgaattcattaatccattcactaatcacctcttaaatgcccacaacctaataagtcacagtttggattaagtgaaaacatggatgttgctggagacaggtaacccttagcaaagtggacttaacgtttgagcccaaaaaatacttagaagaaacattaatgtcatgtctagactaccagagataacttaaattaatatagtatgtaacaataacaaaacatgttgagagttgtaaccttatttctataaatcatggcatctaatataaattaaattaacatagatgaaaacctgacaagaaatttaaatttcttttatgtcaatttttccctgtacctgaattctgaccctgcatatggctttgaagacactgaactttgtctacagttggataaatttaagttttacatatatcaacctatatgtatcaattggtatgagagtggcaatattagcctgtatcacacattgcctttattttgtttaactaaattaaacaaaagcattggattggatgtctaaccttggctgagggtacaggggggaagattatttcaatacactgtattccctatattttcccctattcttatctctcttatccaagactcctggcttcacttttgttggtacataatcccaaagaagcatcactggcagcatatttcattcctcaaacattcttttgaacataaataaaatctccctagatattgataagcttttatgagtatgttatctgttggtaagtctgcaccatctaagggactatacatacttcagtgaatctgtcttccaatgttcaggatcaataaaaatatggcaatctagcccttacatacagtgtgcattctttccaacttcgtattttctggaaataaatttccattacattattgaaattttaaatttctttctattctgtctagaccttaattgaagattaaatacaattttaggatctatacttatattaccctggacataatcatgaaaattttggatgagtctctctgttattacccatctcataagcatgtccattcatcatgtcccattttgttctttctgagcagtttgctgacagctataggcttggtctagagctttgcagacaggttttctggagctgcagcatgggagctgcattatcacagcactgatactttatttgaagtggtacaattgcttaataacaatgcactgtgtttaaaggtagaaggaaaccttttggctctatttggaagtcaaatgactgactatatgatcatagggtcccttcatctttcagttgtgaacagggtctaaagaaacgtcaaagcccatgagaaaaatgaaaacacttgatggcttgaaataaagatttcttatgtaaacaaaaattttgaaacatgtaaaagagttttgacatgccttaccatcatgcagtatttcattcatgctgctgttttccttggtaaacattaactatcaataaagcatatgtacatagaactaaagtttaaagttgtttagaatataaagatatagaaaactatgtatgtaagaaatgggcacaatcatttagacaatgccaaattctactgaaaaacttgaacaatttgaaaatattcttaagaaaggtggatttgaacactaagctctatgaaccaggtggccaggtaaaggttgggccctaggtattctatagtctatgtatgagtgcatacatccttagttggacagaaactcactgtgtaacacaacccacattggacccatgggctatcctattgtctcttcctcttgagtggtgttatgtactaacaagattagctctatttttgtcctcaaatatttctccatagactatttttaacacaataaagcagtacttgcatagtgaattcagccaactacttaagaacctcaccaaaattccacttcctaaatgttccactgtgtcagctctgtaactctggtcactaatcccaaacacatgggccttggggcacaggtcacattcaaacagtggcatatgcatttcctccaatcaacatgccagatttttttctaggaatatatggatacaaaattcagaaggaaggaatttatatcttaacttttctggacaatgatatttattttctcaatataaatctcaatgtttatgatgacattatatatctccatacagcagctttcaaactcattcagtaaagaatgagggacacattacaattttgaggaaaacaagcacaatgaggtaatctccagcctaaaagctaatgaaaacttcagcatttacataaaggatgaggacatggtgaagggagttggaaaatgatgaacccagagataaggaaactaggtggaagttttggcacttagtcaaatttgcatatttgacttctgatttgacgaacacccaagttcatagttaaagtaggcactgtccatttctaggaaaggtcatccaaaaaatacattcactgttatatttatggtgagcaggatgaaaagagaattaaactttcattcagactacaggaataaaaaaagtaggtatgatactctaaaatttgtgtattgttttcttgaggttcagtattaaaacaaccaagagatgaagttgtttagaacttgggtgcaacatgaatgttgaaagttacagccttgattttattgctaaaattattgtgttaatgtgtagctttcttatttccagcttatttggtatcttgattttagggaactgaataaaaaattagaaagaaagatcaccatatcctgggcttggaacagaagcagggacattatatgtggggtacatatcttctttagcagcctgaattgacaaataaatgattattgaaattgcatgtacatcctataactttaaaataatacttataaggagtgagagacaatgcttattactcatgtttgcatttttagtagcacatattttagacattctgggcacattggtggaatatgcgtgctctccatagttatgaaaggaagacagggtagatgtggccagacaagatgcattggtacttaagcttctacatatgaaagctcattcactctgattctttttgtccatctgtgctatccttcatattaacctttactactgtcctcattctgctatcaaaaatctaaagtgctttgaactaattaacttctttaaagtcatcaataaataaatcatacactaaccttggtttttcagtataaattcaaaagaggcatcagtgatatttcaagagcaaatgagttagaattatttcatctttaacaaacagctgagggaaaaccagttaagtttcataaataacattgttaattttaatttcatcaaagcttttctttgggtttaaaacatttatttttcatttccataccaaccccaattccccctccccccttaaccctccctgcctcatccccttcccagccccatccacttcttcaagggggttctttgaaaggtatagagttcatctaagactcattatataatatgaaatttttcagttataaaaggttacatatgtacctaatattcttgttataatctgagttaatactcctctcttagccacttcatgacattaactgtttccctgcaggtttaaaatgcggtggctgctgagtacaatgtgccttgtccatgtatgtggaaatataatttgtttttttgcaacaaccatgaatcctgaagcccacatgaatgttgtaagctattcttatcactaataatactacatgtatttgctttatctctgttaactccattcatctttttgactcattgtatctctttaagtctgaacatttaccaagattgatgacttgattccaaaaggaaattttattttaagaatcaggaaaaatttttgagaacaaaaagattcatgaaactcattactgtgttttctctcctagagtgaaattataatccattggggctatacaagtgaagaatatgaggctgtgactgaggatggttacatcctcccaattaaccgtattcctcatgggaaaaacaacacgaatagcacaagtaagatctgagtaagacaagtattgaagaatcccgaggctatgacatgagtttcttcaaattgagtaatttcaaaagagcaattggagctccttttctcccataattaaagttgggggcttaaaggtacctgaattctaatgacactttgaagactgagatcctgtaggagtggctcttcttttgcacagtgaatattgattaatattgactgacataataagtggaatgaagtctcagcaatctctgttcccttatttcaaaaaccttttcaatttcattgttattatttgaaatttcatgtttaatagacgctaatgttacaaaacattttcactgttgtttttgcagccccaaagaaagtagtactttgtcagcatggcttgttttcaactgctggtgtgtgggtttccaatcctcccaacaacagcctggccttcattctagcagatgctggttatgatgtgtggatggggaacagcagaggaagtacctgggcaaaaaaacatttgtacctggacccaaactctaaagaattctgggcttttaggtaggaaaaaaaactccatataacactacatttgccttaagagaatgtcaaatattttaatggtaaaataaaggtgtggggctggattgaaagcatttcacttggagtgatattttagattgatttgagtgaaatagtttaggactttgcactgtggttactatgcttaacaattataataaaattctcattataacctatatctctactcttgaaattgtaatttttctaatcaatccacttatcttaaaaattatacttctctctcaaactcgtgtgttgtgtgtgtggggggggttgtatacaaatgatttgctgcatgtttggaggccagaaaagaacttaagtgagttggccctcttcttctactatgttggttctggagatctaactctgggtaacctgcttggtaaatagtgcctttgctcacctagtcaccccacaggcctcattcatgtccttataaaactgtttcattgaagttaatttgatatatttgaaacattgatttggtaaatatggaagtattcatacagctactgtattcattcattcattcatttctttttactttgtgtatcctgaattgtgaatgtgtatatacatgattgtgtctataatacatatgtatattcatgtacatgtgtttgtataatgatcagagcacaaattaaggtgtcattccttagacatactgtccagtgtggaaatcactaactagaagagactcactgggtcagctaagcccctatgatatatttatttcttcctctacatgtctgggatttcaggcagagaccagcatacctgacttttttttggttgattctggtgatcaaactctgacttcaattgctttccataatgagctacctccttagctccatactgttgatattttgtgagtggaatgagtaacagacagggtgaaaagacacgggtaaaattacatatgagtgctttgggtcacagagtagtagaatatctcctggagtttattcacaccaatatatttaaacaagttctatcaccattgtacctctggcaaaccctcttctctgtctctcccttctttcatccccttccttctctctttcttgaggattgggagagatttacaacctgattcccaatcttaaataacatgatgctcaaatggagaaccaaattttagaaatttggctctagtgcaaaggtgctctgaaataagtctaacagtttattcactgtggacatagcaatgctagcttaattcatttcaaagtgtacagtcatagatctacatcatgggaaatttgggaacacagaaaagtggggcttatataaggtggcaaaaaagtaaacaaacaaggagtaattgtgagccatgtctcacaaatgcctcccttcatatcctctataaagacatcatttaaaacagaaattatttatttattggttaatagtcagatcacagtttttccattttgttttcatgcagttatgatgaaatgataaaatatgaccttccagccaccattaatttcatcctgaagaagacaggacaaaagcagatttactatgttggacattctcaaggcacccttattggtatgctaacaaagaacaaaattagacagtgatgtaattttatcctgaagaacacaatatatatgtaaaatttgtaactgtttataaaacacacacaagctcttagacagctggtaacaactgtaacttgcttttaaaatgtcaaatgttaaaaccattaatttctaacatacaaaatatttaaatgaagtgtatgtgtgagatacttctaggatttttttatagttagaattcttgatactgactcactatgtgtgtgagtgtgtgtgtatgtgtgtgtgtccttccttatatggcattgtacatatgaaatattggtgcttaggaaaggtttcagtagtctggctccactgagctcttaacttgtcttttcttggtcatttctcaacagcttttactgttactgtttgagtttgtacatagtatatattttcaaagaaaaatgtaacaaaagatagatagatgtttccaactgtctgagtgctagggaaaatttaataactactgcatatatttgctcaatttatagtgtgatagagggattattgatagacagatagattgattatggatagataagtagatagatttgtatatgtttacctgcacaagtgatctgcagatgctgcagagatgatttgtgaaggtagtaatgacagagatcataaaatcaatatgtggtctttgggtagagatgtcttctccaagagttagggaagattatatttttaaaagtgctgagctgattcttaagtatggtaagtctggccattcaaagcagccagcagtcaataaatcaaaagagtcattcataataaattgaatggaatttaaatgttttaaagtcatagcactctgggaagcaaactaagggaaatctccaattttaaatgtctgacaaaaagcaaacataagctcttgagacatgctttaagtgagttcaccagacccaagatagacgataattaggtatttattagggaagcgcttacacagagaagagtaaagaatggccatggtcttcctgatccagagatgcagtctctgccctaacccaagagatcacgagacagcgcctcctctaccttaaaaggggtcacatctgaacatgaaaccatgcacaaagggtgtggccacacccacaacttcactgggaagccaagatgccactacatgctctgtgaaacaacctaacaacacagacaattttaagaagaaggggagggcagcaaaataattttgttttatttctttcagctctgggggcgttttcggcaaatcaacaactggctgaaaagataaaaatgtgtttgttactggctccaattgctactgttgaatatgttaaaggtagtgggcgcctcccatcttacttccatccaacggctttcaaggtttgttatgaactcaaagtggtggcttttcaaaacacgcttgttaaagaggagatctgcctgtacaatccactgctgattcacttgtatgaatagcctcccatgattggctacctcaaagttgaagaatctgagttttgtcttatgtattttcttaagcatgattgtgtttttctttaatctatagctgcttcttactaatttaacttttcatttttaagaatttcatattttagtattgcatattcatcatttccatccctctctatactctcctaacttctcccatgcccctcctttctctcaaattcatgacctcctctttaattgttaccattacacacacctgcacataccttctaagtctattcagtgttctttgtctgtatgcacatatgtttagggatgatcactttgtattggatgatcttttgaatgtttcctaattcgatttatcttaccttgtgatgcactttcgtgttttctatcactggcttcttaaaattgtcacactaaatttcattgattctatgttttcttttactttttacacttgctttcaccttgccagtgtatatactaagttctcttcattattcttgatatcattatttttgtaatatagctactgccatagcattgtagacctgttaggatatatattcattgaagattaagtaaaatcgtggcaaatatcaaccttcaaggtaatgacagttttcactttgtcagtttggatttcatcttatgacactatcaggattccaaggatgtctatgatattgcttgccaccatcaaagcatgatggtaaaatgtacatccttgccatcacttaaggttcttaaacacttttcactctggcatagagcaccaaactgtggtttcatttgcatttacttgtgactgcaggtaggacatcttttcaattgtatccttccacttatgaaatcaatgtcctttccttattaaagatttcattcatttctgtttatatttccaactattttaaataattgcacctgcatgttcttttgaaactgttcactttcttttagaaaggtcaatacatacatgtaaatgcagaacaaacagaactattgtaaattcatggccatccagagctacataggtagtaccaggcaggcataagatacacagcaaaacttattgaataaatgtagaaaagaaaagaaaacatttagatattaaattaccatgtgcttgttgtattctcttttatataataatatcttagatctgtgcttgacaatattaaccttagaagcaagtaccttctttgcctcatttgtaactctcatggcattttcgggatcttagaggctagttaaacattacatgttatgaatatcttcatagtattttggaagtcagctatcctgaatcacctagatttgttctattatagagcatacattatactttaaatcatcatcctaattttaccaaacacacaagaaaaacaaacaaaacaaacaatttgttcactgtctctgtcttccatctttccaaaccagagaaattggtaactcctcttaaatgttttcattaaattgatttctgttatttgttggcattgtcaatggtgggtgtatgtgtgtgactcgtgtgtgtgtgtgacgtgtgtgtgtgtgtgtgtgtgtgtgtgtgtgtgtgtgtgtgtgtgagagagagagagagagagagagagagagagagagagagagagagagatcctgtaccttgtaactttgcttcacataatgcctggtttggtccattctcttttttgtctttgtgtatttattcagttttgatatataggattatgtttttatagtatagttttctcttttcctgtaatcatttgactataccataatgtatgcaaaatattgcttatattcaccccatttttcatctcttagtcatcctcctcaatctgaatgccaccttctttctaaattattctctttctgcttccataatctgttttttttattcactgggcctagttgggtttcttccatggacatgaaagggactgtgaagagatgaaaaactcacccacaaagaaaatgacactcactcaactgaacacagattgattaaattgcctttttctagttaacatttttgcttatatattattagattggcaatcagttgcagaataaatgtttatagaatcagcaagagaaagtattcttttatatatttaggtgccatacattcgtgtgtaaaatgtttcatctaaggacttttcatatacgtatggtttcatagtttgaggatgttaacttgttaattatgaattgttagggataatattgctgagtgctttctctatatatactgagatctggcatgatttctttttagtctattagtatggtgaattatcagttttctgagaattaagctaacatttattccacggacaaacttcactttttaaaatgtattattctttctgtaaatcattttctattttaccagggcagtcaggacaactagcatcccattttaaaatttttaacatttacatttattttctagttttttttattattgagacagaatttcatatatcttaggatggtcttgaacttgctgtgcagctgaggataactttgaactgttcttgatcctccttcctgtactttttaagcaatgggatttcaggtgtttgttagttcctatgaaggttttactcagtactagggacaaagtcaactgagctacacaactagctgccatcttcatttctgtgaagtattggttgtgttttcttctctttctaaatttagggttagggtaaagccagcctcatgaaaagaatagtatccccctactagtctactcatagttacaaaatgctaaaaaaaaaaaataaggttatagacatttaattttactctgtaggctagtacagtctaatcgctacaaaaaaaaagtgtaattattgtgcttcttggagacaggcttatctcagacctttcattgctctcaagtcttccctgtgcttcattccctggccttgagttttttcctcaaatggatgtgctttccatagttagctgaaattccaagtagaatctctgtagatctcagacttctgtcccatctcctctgatggaaaccatattgccttcgtcttctctacacttcattagttcataaatatcaccaagcagggaattctcactggaaatgaggtgggcaatacagcactcagttagttagattcatatttttcacatattaaaatctctcataatttaacatccagtgtttgagaactattgttttgtatgcatattgtgtattttttcaactaatgctacctgctatcattacataatgaagctgccattgtcttcttcccctggcatctctaatcaccaatgtatctactacagttgcgaatcttagtcatttcatctaaagggaatcatgcactgtggtgtcatgtgttgactatctcagttgttgtaaatgtgttagttcacttttgttaggctttacagatacttctttatgaaagaatagcagtctataaggtaaaggtaccacactcacttaatcagaatagctaccactgacaggagttgtcagtgtttttcttgttttgctcatttacaaatttttgtgtggacatgttttctttttattatatgcatgcatcaaaatttccgcacactgtttaatttaacaagcttgcaagtcattaacgctgaacaagaaggaaagagaaagactgccagcacatcaaaatgttcatgattctcagaagttttcattcaattgaaagtgatttaaaaataatcataggatgctttttctcaaattatgtactgagtgtcataacagtgaactaagccacccccctcagtaacatgttatagcttttttaaatgtctttcactccctataaacattgtgcttcctgctagactttctcagactaaaagctgctcttcaaatttgtcaatttcagctcctttttggtgaaaaagaattttggcctactgcagctttcagtaagctgtctggatacatatgcaatgttaaggtaattgacaccgcatgtgctgctctattgggatcgttgactggatatgctccacaacatttaaataaggtgtgtgttatgctctttcaaatttgttattttttcatgctgatgatataaaacaagtctatatggctaattaatctttaattcatttagtatgatctatattaaactcaagatgttctttgcatacaagtcccaagttatcaacatgacaacatagaaaaatctggtatacaccacatgtgaatgattagctgggtgtcatgtatgaatgagtttcatctttttcttctatacactccagtctaatacatctgctgtcattcatctggtaactgatcatttagttcagcaattctgttccagaactaaggatatttccatataaacttttatggtaaatatgagtcattaaaaaggaaattctttaagacataaaaagtgaataaactgattcatattttgttaatatctaaactctccttaatctttgatcatcatcacatattacatcctttgaacaatttagcatcaaaacccacaaaatatatgtgtatagttattaagacaattagagtcttggttgcttcatccagccttaatatgaggtaatgtgcctagtcttattgcaacttgatatgccatgtctgtctgatatcgctaggaggacgtcccttttctgaaagcaaacagaggaacagtggatctggggagagtggaagtgggggatgagcctggaagagggaatgcagccaagtctgaatatatgacagaagaatgaatgaataaaggaatgaagaagaaaaggaaggaaggaaagaaagaaggaaggaaagaaggaaggaaggaaagaaggaaggaaggaaggaaggaaggaaggaaggaaggaaggaaggaaggaaggaaggaagatagtgtcaactctcttgagaagctcacatccaaccattggtgtgtacactaaatctccctaaaatttagtggtgagccctgaagtcacaggcataaaagtaatgttatgtgacttgagaagattatatttttatactttggaatatgtaacaacagttaaggaaaagcagtctataggtagtgaatatgagagacaacaaggtgggggtttgtgctagtgattggaagaccaaaagggggactaatcatataattgcattttaattacaaaaattaaaaaattcaaaacaagaatattcagattcctcttgtggtcaaaattcaatctttccttataaactaattggagatataccgtatgtgtacattagttggatgtatgtcttatcacaacctggtgcacatagggtcattgaatacccaggaactggagttgtgagataccatgtagatgctgggaactgaattgaagtcctttgcaagaacaagtattcttaatcacttagccctccctccagctcttgaagttgtatttttagagactaattaatcctcagtattttgaaatattggttctgtagaaggaagctaaatactaacaaatgtatgtggtgtctgactttctcatagagccgcattgatgtatatataacacacagtctagcaggatcatcagttcaaattcttctacattacagtcaggtatgatttttttaaatacatctctttcttttcttttgcttttgaaattctcctccttcataagtttgaaaaaatctttctccagttgactttctggtccgggtaatacaacccttttgatagattaaaagaaagatatcagtacatagaatcttttgtgataatctcagagtggccatatcattttatcctcaaagagaatggctccctattccagtgaatctacatacatatattttatgtcaaattaataccagttttagtaatcaatttcacagattgatgcaagatgagaattgtagacaccattaaggtctatgagtaaaatgtcatagttttcctatccagttattcagaagaatcccctatgtgacagccaagtcatcatagtaatgtcatttggcaagaggtaaactggtacctgcacatagggagcaggccatctcatcttatgtattttttaattacattctaaaatatactatttaaattctacacatgagcatagtctttaattaaaatatgatatggaaatttttattctattagcccattatcaataaaacagtatatgtcacatcctaagaaatgcctctttatattgctttgttgatagaattctattcaggattctgcaacactcttaacatttccgctttgtttctattactcacttctgatcattataatttcttatttttatagatacagagattatgcaacatctatcttaatatttttgaagattcttctgttgtataatatcacagaacaattatgtaaatgaaattatatattaaggatacaaattttattaaatataaagtattaatgcaaatagcaactaaagtcttatgaagtatatttttaattcatttgaattattgagcagtaaaataacttttacaagtagttattagagatttcatatattttatttttcttatatgcattaatttagattcttataattaatcacatttgataaaatgaaagctgagatttactacataatactaaaactaaatatagcataaaattatatatcaattttgcatccttaaataactaagcttttatgtttaatgaatgatattttctcaacttcttattgacttttcttgatatacagtacatatgaactgatacatgttaaacattattaaaatgtttttaaagtatattttatatgagatggtataaaagaaagcttatgaattcaatgttcttttatgcatattcatgcaatgtgtaatgttctaggactgtaatttagtagccattgatcaggcattacatatcattgagatagaaaatgtactgggtttgtcagagccaatgtgtcattattgcaaaaaagagccaatagaactcaataccttctggttctattctaatataaggctttgtaagtaatggtatgttttatccttatttaaggcgattaatacaggtgtgtttggagcttatgattggggaagtccatctctaaatatgctacactacaatcaggtaagtctttttacccatatttaatgatctggtccctacaaaagacatatactgttaagaaatctaacaaaagtctttttttaaataagaagaggacacattttattttgttaggaagatacaccacacagaactttgggaagattaaaaacaaatagtgttatcttttgtaagataatactgtgaaaaaaatttctatcatggtatttgaatgatatactcatttcacatgtaaagaaccaaggttcagagaatttaggacttgtatgattccaaacttgaatcacagtgcactacaatctgggtgtggtgacatatcccagtaaccttaggattaaggattctgagaggggaggattctggcaagaatccagcataggctacatagaaagtagctgtctcaaaactaaagtaaatatataaaaaatgaaattatttttttcctgtcaaggcctaagatcatcaataatttctatagacatagtaagcacaccattataattatcctgtcacataagagaataagccatcaataacagtcatagtttttttgctaaactctttatcattttccactagacaactcctccattatacaatgtggaagacatgaaggttccaactgccatgtggagtggcagaaatgactttttggctgatgaaatagatgttgcacatttggtatccaaacttcccaatctcatttaccataaaattattgctgattttagccatcttgattttgcagtgggactgagtgcttatgatgaggtgttcaaaggtattttaaaacttcttcatgaatctgagactgaaaatttgcattagctttttgcatgtttttcaaacccctcggaaactttcttgctattgtaagatattttttgcttggcctttttcactttaattgttttttttttatttttaagctatttcttaatttattggattttatttttactagcgaaaaattatgtgcatcaagaaaatgcttcatcttgtgactgtttcttaatgaatgtatgtttttaaaatatttttgacatgagtgctcttgaagagaaggcctacttttgatttgcattgatgaaatcctaaaatactgatgcaggaagaggcccatagggtgatatcagatatcatgatgtctggagagcaaactataaaatgtttcatataataggaccaggactccataagggctattagtcttgttgcttataatccacaaatcttattcactagtctcagtgcaatgtccctaccccgtcacaatctgtgtggaccaggcactgttttgtataagtcactctgacaatattgtctggtttgagaataagaagaaatattacaagtgatctgagtcatatacagataatttacaggattaatcatccatgaaagcccctgaataatgtcacgttaattatacatatatgatctagaactctcctaacaacctaaggtgactataaattgtgtgtgtgtgtgtgtgtgtgtgtgtgtgtgtgcgcgcgcgtgcgtgcgtgcgtgcgtgcgtgcgtgtgtgcgtgcgtgcgtgcgtgtgcgtgtgtgtgtgtgtccttctgttctaagtttcttcaggacttttatttgattaaatgttggactttttgaaaatactttctccatctatgggtgagcatatgatttctgtccttcagtccatttatgtgataatgtattacattttttggcttggaatatgtcagaccatccctgtattattcctggaataaagtctgcttaatgataagtaaattttgtttcttgaaagtgttatttctattatcctcaaatacattacatcccaacagacatttcccctccctctacacctcccaagtcccacccctttctttctcttctaaatccacttctcggaaaagagcaggactcccagggataacatccatatatggcataacaagttacaatgagactagatacaaaaatcatcctgaattaggtaacccagactcagaaacatggtatgtactcaaatggacattagcttttaagtagaggataatcatgctaggagccacagacctagagattctaaataataaggagggttctggggatgggacatgtatgtccttggcaggggaaaacagaattgattttgcaggtatattgggggaaggttgggatgataacatggaggataagggaatggaggaagagagtactgtgagagacaactagaagtgaaaacatttgggggtgatatggaaaccaagtgcagtggaaattccctgaaatatattagggtgacccaaacgaagaatcctagtaatgaggtatacagagcctcaacctgccatcttctgtaaccaggcaaggcttccagtggagggattgggacatcaacccaaagacaaacccttagacccacaattgtctggcctgtaagatgtgctggatttatgggggcacaaaatttataggaatgtccaaacaatgactgatctaacatgaggcccacatcacaacaaggagcccatgcctgacactgccttgaggtccaggaaccagaggctagataactcagacacataagatagaatcaatcatgtctggagagaaaaaggtgaatgaaacaatttctaataatattgcactatattcatagatggtacctaagtgattgtacctcagacaatcactgccaaagaagcttcatccagcaactgatcagagcagaggcagagaaccacagccacacaatagaaggtggagggaagggatgtaggaatcaggggagttgaaccacgtgggaggccaaaatatcacacagagacttaaattaactacagtgctgctggccaatgactaggatttcttatctgctatctcagtcttaattaccaaacataatcattaatctgtatattttataacgacttatagagaacaccagctttgcgtcctgtcttcctggcagtcacgtggctactcctgtctctactacatttcctagaatcctcctcgactgctagtcccgcctaacttgctcccctataggccaacagtcctttatttatcaaccaataaggcaaacatatacacagaaggacctcccccatcataagggatcttagaaactgaagtgacaatcatggaccctgtatgggtctgtgtagtatgaataataaaaacccagagacagatatttgggttcaagcaaagcagccaatcactagagagttcttacctctaccaaggctagagtggccctgtgcttggcatggctggagaccctcatgagaccctgaattcctgtcttatatccctatcttgtgctaggattaaaggcatacacaaccactgcccagtgtcaaactagcagcaaactagtgttgcttctgggtttagaggtgtgtacaactgcctcctggcctctatggctatggttagctttgcattctgatcttcatacaagctttattagatcatgaacaatatatcaccacaggtctgagctaagttttgcatatgtattatggttgtgtagcttggtgttcttggaggactcctaacaatgggagtgtgctcatggtgggggatatctctgactcctttgccagcctgaaaattagtttctcaagtatttctattgagaaaatgttcatctatgctcaacaggaagttagatctataattttcttctcctcatgtctttacctgtttagagtatcaggataatatggttccataaacataatctgtcagtattctaagtattctatctttcctcttttataaaccagtatgagaacaattgacagcaattcttcacctagagatgatggaatttactaatgagtccatttaggtatctaatgaggattttcttttctctttagtttagagaatttttggtaatgcttcattatttattcttactatggattgggctggagagatgtctcaactgttaaaggctaggcacaaccaaaaatattcttggaatggatttccttaatttatatcatcttattttaatcatggtagtttatgtgcatctgggaagttatccagtcttacagaactttctagttgagtagaatatatactttcaaagattccctaggatttttttctaagtttcattggtatctaatataaatgtctcttttatttgtacatttcttgattgcatctccctgcctctcttagttatttcttccagctgctgaattgagcttgaggtgttcttgtattctaagtggctaatactgttgaatttttccttttgaagtctctcttctttcttcatggaggttgttaaagctatgacttctttcatgctggccttcatcatatcatacatgtttcagtgtgttctgtatccatttcaattcttataagtgatttctcactttccttctttatctgacctattcatttaataatgatggatttcattaatctccatgaatttgtatattttctatagatgtacatattctttagctgataacttgtagctttgttccattgaatgcgatagaaaattaacaatggtttcagatttttttatgtatgttaagacttacttcatgacataacatgtgatctgtttttaaaatgttctatagtctgataagaagaatgtgtataacacatttttggatgcaatattcttagatgtctgttaagtctattaatctatgatgtcatttaactctgacattccttttttatctgcctggatggcctttcagtgggtgagatgagttgtagaaatccccttctattattgtacagatgtccacttgtgactttccattcaacagtatcacttatgaaattggttgtgcctgtgtttgacacatatatttttagaattatagtttattcttggtggatttttatgctaatgagtataaagtgactcgtgttttcacttttgactagttttcatttgaagtctactttatcagatactaggaaaatcatgtctgcttttatctgagtttcatttttcacccaaaggtaacatctgtgttttatgacgaggttaaatggatggatcctacactttaaactgattctgttagttatatcttttaattttaaaataaagtccactggtattcagaattacaagtgaaagaaaaaatatttcctatcatttgttgattgtgtagtatttcctaatgttgaatggctattcaaacttgtattccttcttatgactttatatatacatctgtctctttttttcagtatgaaggattccttcaaaattatcctataaatatggcttagtagccatgaattacttaagcctaattttattgtaggaattttttgttctctttaaattattatagcttgttccatatataattttaattgattttttgagaatttggccatatgttattataaccacctcaatcttttgaaatccctagtgagaaattctgttacgatatgtctttccaccaaggccgccttctgagttctgtctgccactacgttaaggtcccaagtaacatagagagactgatattaggtacaaatgctacttggccaaagagtaggatttctcatctactagctcagtcttaattatcaaccataatcataagacttattttatgattaatgctggcagaaggtgtccagccttcctgggctcacatggcgactccagagcagagagcaggaggaagagagagagagagaatgacttccttcttgtccttgcttatatgtgagtctgccttctatgtcatttcctgcctggatctctactacatttcccagaatcctccttgactcctagtcacatctaacttgctgcctcattgggcaaacagtactttatttatcaaccaataagacaaacaaatacacagaagcactttccccatcagagaaatcttgtgaaactttgtactccactcataatgcaatatccttactttgttctgaatatttaacagcttagttatattattatggagggagttttcccatcaatgtctatttagtgttcctccaatatctgttgtatctgtaattgcaatttttaattcagaggacttttgtttatgattttattgacacagttttctgttctttagaattaaattcttttttcttaatacaaggttcttttaatttataaatgaaattctttcttatgaatacaagatatttatttaatttgattaatgatttaaagtcattttaatttatttgtatggatgctttaccagaacaactgtctgtacaccaaatgtgggcatgttccccagagaggcccttgaactacagttacaagtggttatgagccaacattgtactaagaattgaaccaaaatcctctggaagactgactactgctagacatatctatctagtcccaaaatatattggaatctcagatttgatttaaattgtgtattgcatatcctgaaagttctatttgtactttcttaataatttatattgtcttcaaggtcagatagtctgtactctccttgatctattatatacatgagactctccacagatatttttattcaacttactgtgttgttcctttccagtattccagattcatttttctatttccttatttaattccaattttatatccatttagaattttttgtttctttaaactgtgttctttggtgattagttcaggcttttactttctcagtcaattttttttaagcatttcattcttctggtatctctgcctgggatttcatctaattcactctcacccacagtaggtactctgagatagtattatacagaagtctggcctctatcttgtcattcttctgactcctctcagaagtgctgggaacacaggaatgcactgttatatcaaagttaccctggattactcttgagttgcaactccgtatccacttagattgccactgccctaaatttctttagttaagttgaaaatagaattaattatatttaagttaagctaaaatttcaactttttactaccactagctacattttagcttcttaatagcttggtaagaaaaccataatggaaaagagaaacataccatattctctcatggtagcaagttcaatccttggttagctctggattaggataaaagacatataggaatttttataacttttattgaaaccagattcttttctcttcccatatactatatcctaattatagtgcctcctccctctattcctcccagttctttcccaacttccctcccatccaaatcgtctcccttcctgtctctccttagaaaagaacaggcttctaagaggtaatcaccaaacatgacaaaatataagataaaacaaaagccatcacattgaaattggataagtcaaactaacaagggaaaaatatcccactaaaagacaaaagaatcagagacccactccttcatacatgcaggaaacccataaaattctaaactgaaaattatgatatatatgcagaagaacttgtgcaagcctgtgtagaccctatgcctgttcttcaatactggtgacttcatatgagccttgctcactggatttagagcagcttgttctggtgtcctccatcccctctggttcttaggctcttttgacatcttcctctgtggagttctgttagagatggaccagcaatcaatagggtataggttttctttattcagatgcaccagcaagcaaggcagggaggccagagagaaggggtccccacgtctctccatccctttaagaacctccttttacatctcctcagacttcccctcaccccgcccttacgggcgtgtcctggcacacctgtccgggttacctggggcggggctagggtgtctccctacaattccccttttagtctaaaagaggattaaaacttaacagtgtaaaacatctaaaattaactatcataaaggtgaaatataagaagatacaataatctgctattgcacatcctatgtctattccagctaaaccctaaagtcatgtggaaagggtgtctagcttgaatacttccttccaatcccaactctaaacaataagaaggtcattcttagctaggcttacactatcctaataaacaataatggggaactggggaatagcatcttctaagttacttcctgctgaaatgggacgatggtagccctgtggggtccggtgggaaaaaaaatgccagtacagggaaagtctctaatgagttatctctagtccatgctagatgagatttgcttgattgaagatctacgttgaaatcctcaacttgattgaagtcagtactcgaggttctggttggagtgtcagtcgaaacggagtgagttgaatccagtgaagtcggagaggtgtggtccaattctttttccggagcatgtagggattgctgtcaggtgggtactcattggctgtatgggactcaagcataagtgtcatcagagaaatgttcgcttgtacatgtatgtgtactgggaaaggcaattcttgaaaaacgacaattatgagaaggtgtaggcctttaaagaaagagccaagaaaagacaaagatagtcatcttgttcttcatttattctgtattacagcaattggcttcttgatataacacagaaactttaaattttttgttaaataacatgcctggattttagggtaggaaagccaaatccaactctaaatccagcatcaatttaattgaatagggactaggaaatgaagagaaatagagttatttgagagagagctgtaaattttactgtatggcatgttccttttcttcgatggttatagctacgttctttccttaagtatctacacatgtagtatcctctgacttctggaggtgggttttcctgtgaggataaaaacaaagcatttcccatcctttgggaggcttttatatgttcatgaaatatacctcagtaaatacctgtcagttgtccttcttgagagggttgtcttcttcaactcgaatcttgatcaactttgatggtatccaaagattttcttctcctgtggagacaaatgtaaaacttctaccccaataaaacacatgtccgggtttccataacgaggtcagtacatcttagaaatacactggttgattcagttcagcagtttttttcgtagtccagtgtctttccacagatgtttgtccactgtcattggcattaagaaagtttagtgttaacaaagcattatgcaatctatgtttggggggttttgacatctccttaagtgtcctgttagacctttcaacaactgcttgtcctgtagggttgtgtggtatacctatgacatgcttaatgttataatatttgaagaactgttgcatttttgtggagacatatgcaggagcattgtcagtttttatttgtgccagtatgcacattattgccatcacctccagtaggtgtataataatggaatcagctttttcagagttcagagcagtggcccattggaaacctgagaatgtgtcaatggtatgatgcacatatttcaaatttccaaattctgtaaagtgaaagacatccatctgccagatctcattttcctgaatgcccttaggattagaacctgctggcagcgggttttggttataaaaggaacaaggaggacagtttctcattatctccttggcttgttgccaagtgatggagaagtccttctttaaaactttgctatttacatgatgttttttatgaaattctgaggtttctagcagagtgccaatcaataaacaattgatctcatcattgccttgtgccagtgggcctggcagagccgtatgggatctgatatgcgtaatgtacagtggattacttctgtttctgattgttttcatgtaactgcaagaataatgaggttagttcagtattatcagggacaaattctgcagtctctatgtgcaagacaactctctctgcatattgggaatcagtaactatattaagaggttctgtaaaatccataagcacaatgagaattgcatataattctgccttctgtacagatgtgtacggactttgaactactttgaactactaactgctttataaccagacttacctgttttgttagcatcagtgtagaaggtaagaactccagaaatgggagtttgtcttacaatgcatggaagaatccagactgtcatttttatgaatttaattctgtcggtatggggatagttgttactaattgttcccaaaaagtcggtaagagatatctgccaatattcattatccttccataaggaggaaatttcatcattagttaaaggtactataatttctgctggatcttttccagtcagctgatgaagttttaatttgccttttaaaatcaaatcagaaatcttttctatatacatctttaactttttgttctgcttatgtggcagaaatatccattccaatatagtgtcttccctctgcatcagaattccagaagggtattctctggatggcaagataaccataatgcagtctaaatcaagttttatctgatctgcatgtgcatccaaaattctgttttctacccattgtaactcttttctgcctcagcagataatattcgtggactgtttaagtctttatcaccttttagtgccatttttaaatgctttaagtcatatccttccatactaataatgatttgtaattgagaaatttctcctagtagcttctgaagactgttaagagtttgataatggtcccttctaatttgtaccttttgaggtctaattctttgtaagtctatcttatatcctaaatagttcatagaatctcctctttgtatctttcctgtggcaatttgtaaaccccatctaggcagaacgtccttcatcatttcaaacatacgttccaaagtttccttattagaatccgataaaaggatatcatccatataaatgataaacaagagattgtggaaattttttacgaattattaccaaaggttttgtacaaagtcttgacacaaagtaggactatttagcatcccctgaggtaaaatcttccattggtatctccaaactggctttgagttattaagagttggcactgcaaatgcaaatttctctctatcactttcttgtaatggtatagtgaaaaagcagtctttcaggtcaattactatgattggccatccttcaggtattaaggaaggcagtggcattccaggctatagagagcctataggctgaattatcttatttatggctctcaggtctgtcagcattctccagttacctggcttcttcttgataacagatacaggagaattctaagggctggtagattgctctatgtgaccagcctctagctgttcctgtactaacttttctagagcctctagcttttcagaggtcaaaggccattgctctatctagactggttcatctataagtaattttaattgcagggcctttggttcctctgaaggcctatcatttgtatttagtgtctgtacagcctggatagttggtaaccattttccatggcgtcttacccgatcctttctactatccagcaattttctagaattcgtatctgacactggacggatgttaattttagtattccattgctgtaatagatcacaaccccataaatttatagcaatatctgccacataaggtttcagtcttcctttctgtcctttcagtccaatgtagaccaccgagttaacactccgtcgaactctagttccaattcctaaaaattgtacatttgcctctttaaggggccattttttggtgagggtctaaacaggtttgcacaagttcttctgcaaatatatcaatcatctaaaagacactctcaggggcaaacagcatatacatggcaaccaacccaattaaaggatcttaagcatattaaagaattggttgtctcgtacggtcttcatagcccatacgtaaaacagctgttgcattcatgggccacctttaacagggtgacacccgcaaattgggtaggactggcatcagctgtccttgagaattcttgccaaatggagtggaaagcattgtttagagaagaagggagactcctagaatggcaagccaccaggaacggggttgatgagcccatccataaaatcctaggagaaggtatttatgctgacccacagattcaggctgaatatgatgaccatatgctttccctaagcaggacagcagccctaaatgcatgggataaggttcatgaaccaggagaacgactagaagcttatgcgaaaatagaacagggacaaacagaaccatttaaggacttcttagaccaattgaccaaagcagtagatatacaagtagcagatccagcgataagacattcaattgtgtataccttagcttatgacaatgcaaacccaatgtgcaaaagaatacttttgcctctaaagatcagatcagcaccactagaagaatgggttctgcatactgcccacattgactgtaacatacaagatgctagaatctgggcaggagaagctgtcccaagaggtttcaacagacagcagcagattagaagagatagtaacagaaggacttgggaaggagaagcacctttcaggggctcacacaggtaccgagaggccagtgctcatcgccaccgtgacccagagcctcgcataggaagagcacgctccaggagtccacgaaagcatcaggagaatagatatttcagctgtggtaaaatgggacatataaggagaaattgtagacagacaaattctaacaattccccacgtgacaggtcactgccctctgtgttatgtaggagatgtggtaagggcaaacactggactaacgaatgcagatcgactagggacatgcaagggaacctgttactgttgggaaactccgaagggggactccagcaggtccccacctcgagaatagtttgatcgttcccagtgacagtgggagacaatctctcacaggacaaatagatagttccttgcctattgtggaaaatgatactgctctagatggtagttcgaatagtgatggagaatcaaatgtgactagtgaaaatgagaaacacatactttggcaagcttctattaatgataaaagccctcagttagaaataaaaattaatagaagagctattaaaggcatagtagacactggagctgatgtatctattattacccagaaatcctggcctcaggattggtgacttcatatgagccttgctcactgtatttagagcggcttgttctggtgtcttccatcccctctggttcttaggctttttccacatcttcctctgtggaggtccctgagacttgaggctctgaggtgagggatttgacagagtcacccaattttgggctgagtgttccgagctccccgccacacacacacacatgagcacatgcatgtgtgcatgtgtgtaacatctggctgtgagtttctgtatctgttcccatatgctgtaggaagaagtttctctgttggcatctgaacaaggctctaatacgtgagtatagcagaatatcattaggattcattttacaactacattttggctttaccctagtttgctgttctgtctagtctctggttcttgttaggtatgggtcctatcttgtggaggagtgggctttaaatcaaatcagacattgattggttactctcactagacatatgccaccattcagattgcattttttataggcaggacagtattgtatatcaaagggtttatagctgggttggtgtttacttttctatcttggtaatctgcagagtaccttcccataccaaagacattataacataacaatgaaggttctatgtagacaccagcttgccctttccatgttcagtgagttttgttgatattgtcttcatcagtggagccttgctgttagtttgtgaagagcaatatactgttttgacaacatcctgttttgctcagaaatgtccatgggatatttggacaataacttaattggctgttgcccagtcccagtacgggcaccttcatttggtggcaagagatggccagttggaaatccatcttccccgttatttggtgacttcattaggaccaccttcatatatttcaggaagttttttcttttctaagtttccatacaacccctcaaatgctcctcaattctagctgtctctcccgatgttccatctctcaacctcatctcatctacctctccccgaccaggtccttctgttaccatccctcacccacccccagtcttccaaaacaatctattctattttcaccttcctaagagatctgtgtgactgcccccccatcctgcagtcccttcctctctgggactacagattgtggcttggctatcatttacgtaatggctaatttccacatataagtgagtacacatcctatttctctttctgagtctgtgttatctcacttggggatgattttttccaggtccatccattcacctgcaaatttcatgatatcatgttttaacagctgttaagtatgtaaagaaaatgtggtacaatgtgtaaattttcttcacccattctgctctcaaaggacatgtaagttgttttcaatgtctggctattttaaatagagctgcaatgaacatgattgggcaactgtccttagggtaggagggaacatcctttgctgtagctcaaggtctagtgtagattgattcccctttttctaagaacctgccccactgatttcaagtggaatcggggtttcaaataaaacataagcacatacatatccatataatagaaaaataagcatcagttgtgaagagccacatttggttatttagatttcagttataatcttatcagtttggttttccacagttctccttcccaccactgctaccaccctcctcacctccttccacccacttcaccttccgccagcccatccccactccactcctcaagcataagggtcccatgagcagtcaacataatcttgcacaataggttggggcaaggccaggcccctctcccatgcgttaagactgagtaagtctgggagataaaaatgtgctgcaaaggcagtgtcttgcttctcaaaatataaagtaaaagctgaatgatacaaaaaaaaaggactgagcatgtcgttccaccatgggaagtaggctccaacaagctagctcatctaccaggattatactgtggtcctattgccactgagcatggcatcccatcctagggaatgggctctaataagctagctcatataccaggttttggggctggggagatggttcagaggttaacagcacatgttactctttcgaggtcctaagttcaattcccagcaaacacatggtggctcacagccatctataatgagatctggtgccctcttccggagtgcagacacacatgcaagcaaaaaatacggtatacataaacatttttaatcaagggttttaccatgtaagcctgactgccctagaactcatagatctgcctccttttgcttgcttttgagtcccaggattaatggcatgtaccaccatcattaggttattaaacatattttaagtgcttaaataacattatgagactaggacatacatggcattttggaaagcagaaacatacagtatgtttgtactggagacagtattgttgagtagctttgcataaaaaagaaaaaaaactttaatggaactggaaggtgtgatgcattctacggagggaaaatggtaagcaatattcttaatcagctgtgaactctgctacactgacatagcaagataagccacaaagtaaaatagtggcatgactgctatggttgctactacaactgtagttgctgctgctgctactactactgtagctactactactactactactactactattgatttaaggaccactctggaaggtgaaattaatgcctgccaccaataaatgggtcaagaagccaaggcaggataggtcaaggagaacctgttcatatttgctaaatgaacagtattaaattgtttcccaatactttcttttacctttctacccatacattattgaactgttcaactcaccagaaaggtttgtcatgcattagatgactattaattgactataactacagagacttacaacccatcaagcttcagaaaaaaagagactgagaaatgcccatccataaatgagacatctacagcacattcattcctctaaatcagtggctctcaacttcctaatgccatgacactttcatagaattcctcatgtggtggtgacccccaaacaaaattgttgcttcataactacaattgtgctactgttatgcattctaatataactatctgatattcaggaaatctggtatgtgactctgtgaaagggtcattcaatcccctaaagggataatgacccataggaagaaaaccactgctctaaatgctcagggtccattggggagtaagagacagaaggattgtaagagccagaaacagtgtgtaactatagctaagtacagttttcaggtcatgagagggttgttacagacatttatcccacacagtatctgtgactgcatgctaaacacccccacaaaatcaagccaggcaaaaccttagcccagataccacagtcacaaagtaccacatggacctgaggagctattagtaatcgatggcagctagaaggagggacagtgttttgtgatatttcaattttgttctgacaaataaagcttgcttggaatcagggtggagccagccactatctggccatagaggtttggaagactatagacagagaaggagacaagaagtggtaaggcaggcagagagaggatcttgtcctttttggatggaggaatgcaagaggtaggaagtgcctggcagttgctctctgttttctgatctttcagattcttaccccaatgtttgactcccaatttttattgacaaagattagttagattaatgctctaatcagtcttcttcagcagtgtggcttcagagaggctactcatgacctagtaaatggttctcaactcatgggttgtgacccctttggggggtcaccttaggtcaatggaaaacatagatatttccattatgattcataacagaagcaaaattatagttatgaagtagcaatgaaataaattttatggttggggtcatcacagtgtaaggagctacattaaagggtggcagcattaggaaggttgagaaccaccatggctctagtaaatcgtctacaaaacaaaagggaatacaattgaagcacaataaacaatgtatctttgcatattgtagaactgtattcctgaaaatatattcatcatacttgagtggtttttgctgtatccttaacaaatgtaggcattcagtattttaaaaaagattttctaacatagaataccattttattaccagagtctacagtagaaatgtaacaggaagttaggtccaatcattcacttcaaaacagcaaagaagtaatgttgaaaatgcagggaaggattttaatcaattaatgtcgaagacagaaattaagttctcaaccctgtagggagacaccctagccccgcccaatagcaacccagacaggtgccaggtggacccaggactcacccataaaggtggggtgaagggaagccggggtgacaaaagggaaggttcttaagggctgcacgtggagaccctggccccttctctctggccacgctagcttggttcctgtgacctcgctctggcctgcgttttgctctggtgttctcctgaataaagaaattttactatcacagactataggtcatctctgagcacacgcggcaatcttaagagttggtacccaacgtgaggcacgaacctacctggatggggtttacaaattgccccagaaaagatacaaagaggagattctattagctatttaggatataagatagacttacaaagaatcagaccacaaaaggtacaaattagaagggaccattatcaaactcttaacagtcttcagaagctactaggagaaatttctcaattacagagtggaaggacatgacttaaagcatttaaaaatggcactaaaaggtgataaggacttaaacagtccatgaacattatctgctgaggcagaaacagagctacaatgggtagaaaacataatattggatgcacatgtagatcggataaatcttgatctagactgcattctggttatcttgccatccagagaatacccttctggaattctgatgcagagggaagacactatattggaagggatattcctgccacataagcagaacaaaaagttaaagacatatatagaaaagatttctgatttgattttaaaggacaaattaagactttgtcagctgactgggaaagatccagcgggagattatagtacctttaactaatgatgaaatttcctccttatggaaggataatgaatattggcagatagctcttaccgactttttgggaacaattagtaacaactatccccataccgacagaattaaattcataaaaaagacagtttggattcttccacgcattttaagacaaactcccatttatggagttcttaccttctacactgatgctaacaaatcaggtaaggctggttataaagtaggtgaggtaagtaaagtagttcaaagtccatatacatctatacagaaagcagaattatatgcaattctcatgatgtttatggattttacagaacctcttaatatagttactgattcccaatatgcagagagagttgtcttgcacatagagactgcagaatctgtccctgataatactgaactaacctcgctgttcttgcagttacaggaaacaatcagaaacagaagtaatccactgtacattacacatatcagattccatacgggtctgccaggcccactggcacaaggcaatgacgagattgatcgtttattgattggcactatgctagaagcctcagaatttcataaaaagcatcatgtaaataacaagggtttaaagaaggacttctccatctcttggcaacaagccaaggagatagtgaaaaactgtcctacttgttccttttataaccaaactccgctgccagcaggatgtaatcctaaaggcctttggaggaatgagatctggcaaatggatgtctttcacttcacagaatttggaaatttgaaatatgtgcatcataccattgacacattctcaggtttccaatggactactgctctcaactctaaagaagctgattccattattacacacctactggaggtgatggcagttatgggaataccggcgcagataaaaactgacaatgctccagcatatgtctccacaaaaatggaacagttcttcaaatattataacattaagcatgtcacaggtataccacacaaccctacaggacaagcagttgttgaaaggtctaacaggacacttaaggagatgctccataggcaagctggtaagtcgaaaccccccaaacatagattacataatgctttgttaacactaaactttcttaatgccaatgacagtggacaaacagcttcggaaagatactggactacgaaaaaaactgctgaactgaaccaaccagtgtatttcaaagatgtactgaccttggtatggaaacccagacatgtgttacgttggagaaggggttttgcatttgtctccacaggagaagaaaatctttggatatcatcaaaattgatcaagattcgagttgaaaaagacaaccctctcaagaaggacgactgacaggtatttactgaggtatatctcatgaactaaataaaagcctcccaaaggatgggaaatgctttgtttttatcctcacaggaaaacccacctccggaagtcaaaggacactacatgtgtagatacttaaagaaagaacgtagttataaccatcgaacaaaaggaacgtgccatacagtaaaatttacagctgtctctcaaataactttatttatcttcatttcctagtccctattcaatgaaatcgattctggatttagagttggatttggctttcctaccctaaaatccaagcatgttatttaacaacattttaaagtttctgtgttatatcaagaagccaattgctgtaatacagaataaatgaagaataagaggactatctttgtcttttcttggctctttctttcaaggcctacaccctctcataattgttgtttttcaagaattgcctttcccagtacacatacatgtacaagcgaacatttctctgatgacgcttatgtctgagtgccatacagccaacgagaatcagcctgacaacaatccctgcatgctccggaaaaagaattggactacacctctccaactgcactggattcaactcgctccgtttcaacccacactctaaccagaacctcgaataatgacttcaatcaagttgaggatttcaacgtagatcttcaatcaagcaaatctcatctaacatggactagacataactcattagagactttccctgtactagcatttttttccacaggaccccacatgactaccattgtcccatttcagcaggaagtatcctagaagatgctatgccccgctccccattattgtttattagggtagtgtaagcctagttaagaatgaccttcttattgtttagagttgggattggaaggaggtgttcaagttagacaccctttccacatgactttaagacttagctggagtagacataggatgtgcaatagcagtttattgtaccttcttacatttcacctttatgattgctaattttagacgttttacactattaagttttaatcctcttttagactaaaaggggaattgtacggagacaccctaacccccgcccaatagcatcccagacagttgccaggtggaccctggactcgctcaaaagggcggggtgaagggaagccggggtgacataagggaagattcttaagggctgcacgtggagaccttggccccttctctctggccgcactagcttggttcctgtgacctcgctctggcctgcgttttgctctggtgttctcctaaataaagaaatcttaccatcacggatataggtcatctctgagcgcatgtggtaatcttaagacaacccctctgcagaccttccacaggagtccccaaattaaatgagagactgcactgaagatgaggtagggagcataaacatgcagctaagctattttgggcaacttgtgtctgatttatcagaatctcaagtggctcttatctctgtcaagaaaaccaatattgattgaaattgtagtttccactctcattactgacgtctatccaccagacctttcctggaatctaggatgactgagaaaagaatgagtataggagatagatacaaaatgaaggtagttatattaagtcttatcctgattcttggacattttctggtcacctgtaaggtttttttgcagttttatttttaacatacttacttatccctctctcacacattatatcccaagcatagtttcccctcccagttcctcaccaccttccatctcccccagatccattccttatttttgaacatagaacagttaaaattatttttgttgaattttgtgttttttatttttagaattctattttatttacatacatttgtaaatgtcttgagattttataagaaattcattttcacacatttattatttatactttgtaaaaaagttacaaatcatataatagatccctttactgtttttattgctatgcttccatgtctccttagggcatctatgttcgcccatattttcttcaagttcctatcttagataaactaaaaatttgattcatggaaatgtttgtcaccatgtagacattaagcaaaacttgatttttaaatgtttattgttattgactacttaatagttccacagcacttttcaagtaactatttgtaatggttcctactttccattgctttttgttttattgagaacctctaggacacagttgaagatagagcagtggtaggagcagaatccattccacattctatcccttggtgcacagtgaacccattgggacacagaaggtagcatttgttgaactggtaagtgatgtcatattttctggtgaacccaagcatctgtattcttcacagctttggaaaggatgcattgttttccacatttcacagacggaggagcggatgtcaggaaaaacataacttgtagaagaacacatagtttggaatgtctaaactgctgtaacaaaaacatcttcgtgattgcaaaaccccttcctgtcatcaaaagtgacctgaaagactcaagaagaaatccagctgtggcatccatctctactctttccttccctcccttgagtcctcctcctaggcccaggccgaggctgtgccttctagattcttcttcagggccggaagggattctgggctcaccgggcgagcatctcggtggaggcctggggcgggctctctcggtctcggtcaccgctgagggttccccgccctctccggcgcaggcggccggcccagggcacggtcctgaccctcgcggggacacggtggccgcgtgagccggcgacactccgagcctcctccgccaccggcgcagccgagagccgccgccgccatgctccgggtgctggtcgtgggcgccgggctgaccggaagcctgtgcgccgcgctgctgaggaggacggtagccgggcccctgcacctcgctctgtgggacaaggctggggacgcaggtgagtgctgggaccgcaggggcgggaggaacgacctcctcagagcgccaggcccgccaccctgaagagaaagggccccggcgggccgcagctcgcacgccacagagcggcggtcacgtggcccgcggctgctgcagccggaagcaggctgggtgcgcgcgcgagtggaggtcccggtggggcccagaggctggcccggagcggaggactgcccagggaggcggcccgcgtggacccgtccgctgcctctgggccaggccgctcgtgcctcagcagctttctccagactgggcagttcccaaggccctcttggccaggcctttccaaacgtccgaactcaatgtcctgacaaaatagccttccttggtcattctggcatttcatccttgtcgtcttacccatccactctttctttcatttgtgcagggtaacaaattttttattcaaataaaaaaaattgcaatagccaaatacccaggacaataagtaacgataaagacttcagcttagatttaataatgtttctcatgtatttggacaaagacaataaagcctccaggctctctggggtgagttgtagaatttcgaaaggttcattctatgcactgacgattgcttctgggttattttaagggggaagaatgattactgccaacagtcctcagaatccgcgatgcacagctgacttgggagctcagtacatcacctgcacgcctcattatgccgaaaagcatcgagagtaagttagtcgctacctggagacttagtagatagatgtatgttgtaaagtgaaataaatcatccattctaacacatttaaaactttgcctcttgcgacagtgaaatgttcttatcacccttgtgaagactgtataagattacataaaaggctaaatacatattagtaattggtgttggagatggcagatagtaatgaaagtcggtatttctaagcacattttaaatggggcatataatacttttttatgtactttacttgacttcacctttatatagagaaatagaagttatgaaattagccataatctcagtagacgatttacagattcttgaaggatatttgttctccccctgaattacaagtgttgtttaacacagtttattgagttggtcatataaggatttatagcgtgatttgtttttttagaagacaagacagtggttacagagataatcacactatacttttccatataatcatttcagattttatgaggagttgttagctcatggggttttggtgcctctgacctcgcctattgaaggaatgatggtgaaggaaggagattgcaactttgtggcacctcaaggaatctcttcaattattaagcactacttgaaagaatcaggtgggacttgggttttctctgccttttaagtcaaagttgtgcattcaatgttagtatcgtatagaagattataaaaatagttatactcttttcttcttaaaatcagtccttccttcctccaaaataagcctgttatcagtttgcagtgtgtgatttttttatttttttaacaacttttcattttcctattgagctgtatggctgtctccatttactactgttctgtttatattagtttccttaaaatatgaataaaggggttaatttatataaactattctgtattttttgtttcatatctttggtctattttccacaacaacaaatttaatttgctttgctctctttaatagatgtccaaaatagtacagtatgtgtatataatcattcattcaactttcttatatgtatttatattttgaggaatgggggctatcttgatttttgagtaaacaaaaacagttttccatccttcaacttgatatggctgtagaattctaacaagttgtgcttctcttaaagaccatctcatcagtagtgaatgagaatttcctcacatctgagtgctatgcaaattttaaattttttaccagcctcataggttaaaaacagcattttttgtagttttgttttttatttcctaaattacaagtgaatttatacaccttttgctttgttaaccagctctttgcattttttctttgaatgtcttattcataattgaaccctattctattaggattttcatttctcctatatgcatttttatgaatgctgtgaaaattgatattttactaaaagaacaaatagaggtattcttgggtgataaattgtttttctattatagaacaagctttcttggaaatttttaatttggctaagtaccccattcaagattaccacagaaaggtgtgagcagaaaatttgttctttcacaactattcgtagaattattacaattttggtcttccttgtcaaacattacttagtgaaagcctcaagaatctgagcatgagaagggtccatgagattgaatatacaataggacacctaaaaaatgaagttctgggttaggccatttctccacttgagattcagactatgaaagtttaattgagttcttcagagatattccatgtatattaccaactatagttcagaaacattgaaaaagggctaggcatggtggcatatacctgttttcttagggaggcagatgtaagatcaccacaagttcaaaagcaacttgggctacatagtgagttccaggccaggaagggctgtagtgtgaaaccctgtgtcagtaaacaaaaaaaaaaaaataaaaccaaaatatgaaaaacaattccagaaacttctaaaagacaaacctgaagttgctgcacaacttaaagtagcatagtataggcacactcactgattcatgaacagtattctgagagagggcccagcatatggcagtggtgccatccctgggttggtggacctgggttatctaagaaagcagactgagcaagtcatgatgaacaagcccataatcagcacgcattcatggcctctgcatcagctgcagcctccaggttcctgccctgtttgaatccctggcctgactcccctcagtcatggactgttacctagacatgtaagcttaaagaaaccctttccctccaagttgtcttggtcatggagtttctttcagcaatagtaactctaactaggacagagaatgatggatcaacttctttgttttaaaagtgccttatgtattcacaaatttcataaaaagatgagtttagcctctggatctctggactagaagcatttatttgtgtttgcctaccaataggaaggcatattagtgcatattccttcaagatgatattggtcagcaacatggaaagtcacaatatgcagtatgacttgacagagtaggcaggattcatttatttaaaaaaaatagttctttttagccgggcattgtggtgtatgcctttaatcccagcacttgggaggcagaagcaggtggatctttgtgagtttgaggccagcctggtctctagagtgagtgacaagacaggctccacagctacacagagaaaccctgtctggaaaaaacaaaaaaaaaaaaaaaaaaggttattttttaatttggagatgctatccattgagggcttttgcatagtaatatttacctttcattatcttcccttttcatctgggtacttttttctaaaatagatgtgagggaagtgagcccgtgtagatctctatcacagttctcccttctgaggattcgtgacattattcggtacaatgttctttcaagggatactacaaagtagcatgcaaactatattccattgactactttaatcactacatctagagggctttcctatatcttcaggtctcatctcagcattgccaggtgctgtttactaaaactaatccatgggaaatgatacaagaaagatttacttggattttcctccttaaaaatggaagaaaatggatagggaggttgcttggtcggtaaaaggcttgccataaaagcaagatggcctgagtttaaatccccagaacccacaaaaaataaaaaaatattaaaaagctgggtgtggcaacaagagcctatggccacaagtactgacaggacagagacaagaagatctcaggaatttgggagctagtcagcctgtctgaaatgacaagtttcatgttcagtgagaactaccctccaaaaatttggtagggaacattgactcctcttctgacttccacatgcttgaacatagtatctatgtgtacacacacacacacacacacacacacacacacgtacacacacacgcactgtagagggaggttgggatgaaatgaaaaatctatgtactagaaacacatttgcttttataaaatgtttaaaccttactagtcttctatctatatagctatgtgcaaaattaaaaagtctcattaaatagcatgcactgggtgttgtggaactctgtcctctagacattgcttggctgttcagtctttcaaatcttagcaagattatttatccaagaccctcacaaggctgttcccagtaatacttcttcatggagcttgtgtatagacttggagaggcaaatcaggaggtacaagagttccacctttccctgatgatgtttaagtggttagtgtagctgcctggaaggaatcccatttaaactccttattttccaatgtggacttgggttgaacggtttcctggggcactgttgccctctcttgactgaatagaaaaagtgcaagcgggagaaattggacaacaaaacagttcctacctgtcaatgtagagtgcagtattgggctagggagtcattaaattgttcctttaacacaagatgtatagtaaatgctaagaaggatgtgagcactgtgaacgaatatttagtaaaaacaatacctgatgtgatatattttggcgtggtgagctgagaagatgtcaggaaaagtgtcaacagaggaactgacatttcacgggtactttcaaagtatcaagtgtgaacaagggcaagagccaaggggctagagtaacacagagcagggactggagcagtcatgaaggagacacagcaaagtgcatgcaaggaattaaaagttaaccatgattggagagtagttcgaatgagagagaaagtgacacgatgaagtaaaagataaaacgtgactcaggcgtaaatgctttgtaaatggtgttctctgtttccaagtgggggtttccagagcatgtttatttttaatgtgtggtgtcttataaaagttattacttctacagggaaattcctctttcctggaaacttgaatcctagcaccggaaaagacaattttcctttcttctttgaaaatactacttatggagtggattttgcaggagtcatgttagcttaagtctgctcaactgcattttttcatactttatactttatttatcctgttaaataagagagcttgtaaaacaaaggtttcgagacctaatcctaggagttcatagttttgtggcttgcttggagcctagaatgtgcatctgtgttcctgatgctgctcttctggggtcagcacttacaacacttctcatgttcaacttagagaactccttgagccattggaattgatggccaagaatttcagctgaatcttggagaactttataggctagtggattttgatcccatttaaatacacacacacacacacacacacacacacacacacacacacccacaaatacacatcttcacacacttacacacttatacacatacacacatcctcacacacataaatacacataaacacacagagctaataacaacatcttttcaaaggattatttataaaggaccatgtaaatgaaatagaattatgtgctttagttggaatctgaaagaaaccatggagtaaggtaaacagagaaagacattccaaagaagtccaaaagttaaacagagtagctttgttgggataaagaaatggtgggtatgggttaaacctgaaaattatttgaacctccccaaagcagagacctcagaaaggcctcagaaacctcaccaagcctcatggttgaacagaacagtgctcactgcctcaagcaagattgatcccttgacccagttaccacagtgccccttctaacatttacatttcacttacatttgattacttactgtagagaagcattctccaagggacagtgaaagacatgagactctagaaatggatgcctggcactaagaaaaatagtaacaggtagataagacatagacaaggcatttggatattttgaattgatgtcaaatgggtatcaaaggcagatgttaaaggacatcacagacaggaaggattgggttgagctggggatgccgtaagatggaggttccacagatgaagccggactgaagcaggtgatgatgaacattgaattcactgtgcttgtaatttctccattgtatcatcagttttcccatgcatgaagctggataaagtatgtttttctggtgtatatgtatatgatatacatgtgtgtatgtattcatgtctgcatgtatgtgggtgtttgtgggagatgcatgtgtacatattagtatgtgtagtcccatggttgacatcaggagtcttcgtcaaccattcagtgccaattgtttgggacagtgtcttccaattgaatccagagttcgtggattaggatacagctagtctggctaatcaacttttccccaggatttcctgtctctgtcttctgagcactgaaattacaagcaggccaccattcaggggatcaaagtcttcaccagatctgaagtttgaggtaccagtatcttaagacttaatcatccaactggaatttcttttagtgtatggtgtatgatttattctcttaaacaaatgatggccaaaaccatattatgtttcaatcactgtaatttgtatattatatgctgtcttagttattttacttctgctgtgatgaaaataccctggcaaagccgcttcagaaagagtgaatttgtctcactgttcagaattccagtccactgtggtggggaagtcctggccgcaggggcctgtgcagctggtcacatcactcctgctgtcaggaatcagggaatactgagtgctggtgtgcagaacaaattccccttaatgcactttggaatcccagcctagaaacagtgttacccaaattaagggtggtcaccctacctcagttaatctctcatcaaggtagtttctcaaaacatgccctggggctggatcctaggttattccagatactgtcaagttgataatgtcagtcaaacatgacatatgttatacatggaaacaaaatggtcattaaaattattcatgactctaaaagggaggacaacataaaaattaggaaaatcattataagaattttacggtacactctaagaaaggaaataggatggcaaagtagtcagtgattctcttagttctgatccttaatgaggacttaatctcccctacagacatgttttagactgcatgagggcatattggtaggtattactagtgtaattgctggtacatttactgaagtgtattcatccttatcctgcaaatgtgacaagcttcctagtctcctgtgtatgttttaaatcatggcttaacagattgagatctgtttaataacatgtaacaaatatgcagctattaaattagtataatatgtcccaaatgcttgactaatgtggtggtctacatatagacacctgtgtttaaatacttggtccctagttaggggtaccgcttgagtaggatttggctatatggccttgttagaggagtagtggcctcgttgaaggaggtgggtccctggacgtgggctttgaagtctcaaatgctcccgccatcccgccattcccagttagtcctgtccctctgcctcttggttgtctcagcatctaagctctcagctacttctctaataccatactgtgtgcctgctgccatggtgaccagcatgataggcaaagactcattctctgatactgcaaacaagtccccccaccccgccccaccacattacatgatttcttttcatggtgtctctttgcagcaatgaaaatttgactaagacagctagtacatatttttccttttattggaaacagattcttttcttgtacaatatatcctgattcacatactcaggagttacattaaaaaaattaaactgaaagccatgataatatatgcagagacctggtgcagacctgtgcaggccttgttcatgctgctgcagactctgagtccatatgagtgttgctcagttgatttagagggagctaacacattcttaatgaaggctggctatgatgtagtagaagtagatttagaagaagtagtagtagttgtagccaacatagagtgtggtataattttttccttcataacaaacattgattggaggccagggatgcaagtggtagagggaggaagtactattgaagtaaagagtaaagaaagatgtgagtcgggcgttggtggcgcacgtctttaatcccagcacacgggagacagaggcaggcagatctctgtgagttcgaggccagcctggtctctagagcgagttccaggataggctccaaagctacacagagaaaccctgtctccaaaaacaaaacaaaaaaaaaaacaaaaaagaaagaaagaaagaaagaaagaaagaaagaaagaaagaaagaaagaaagaaagaaagagaggaaaagaaagatgtgactatagaagacaagggtaggagtgtttcatccacctgaatggattagtttggctttttatttcttctgcatttgtgtggaaaatcctggtaacaaggtcctgatgttgcctttggagcaggtgcagaagtcttcttcaaacagcgtgtgacccagatcaacctgagaaataatgtgtgggaagtctccaaagagacaggctcccctgagcaatttgaccttgttatcctcaccatgccagctcctcagattctggaacttcaaggtgacattgtgaactgtgagtatgccttgctgtttacctattcagggaacatcagattgggagggtgcagatttgctcttctctttgagagaaagatctattatcaattctgatggtgttatgttttaaaatggttatggtctacttcctggttagtctaggttataatgaaacttatatgtttttttggactggttagaaattgaacagttctcttagtgcccttggtttaaaacaacttagtgttgcttttggctgtgctgtagtgtggcccaaaagagttgtagtgtggtcatcctgaagaaaagcttttcatcgtggcttcctattagcttgcctcatctcctgtcttctgctctcggataagtatttactaagtatttactgctgctggatgaagtctcttagcatcactgatgagtaggtggatgtgacagaggatacattgtcctgatggagctaaaattatgttaaaagaacaaaatttataaaaaaaattataaggaaattcctttgtttaactaagaaaagggttaaaaaaaaaaagcattttctccctaaactaacatattttaagaaggaatttggtgggccatggataagcagaataacccattttgtaagcaaatccaatattattctttcatattttggtttcttatgcatggaaactattaaaatattacaaaggttttgttgaagaaagcaaaaagtcactgtgaacctgggaaatgtaaatatatttagctgggtggtcagtttttgtttctttatgtacctgagacatgacaagtggggattctcctcagaagccattctcgtcatgggtttgagcctgtccctatggtgccaattcttcctgccttccatcttcatagaacctagataatagggctgtggaaaatcagtcactcccaattcatgctaaggtgtgttcaggaagggccaggaaaccagcatggactgttttgccggaatttactcaagatggctttcaactccagatgttccctctgattcatgatcctgctaccatggtggacttcccggcttcagcgtgtgccagaggaaaccctgcttcactaagctgcctttttcaggtctttcgccacagcaacaatgaaagtgactagtgtagttagtgtgtacagaatggtgattttatctggcaaaatggtcagatattggcaatttcacttgagccaacaaaagtgctgtatataaataaaggagctgaaataaagcaatgagcaaggacagtcattagtgatgtggatttcaagttttcttaggacattacagactactttgaagccaggcatcatggtatccatttcatctcagcactcaggagtctgagtcaagagcacagcaaatgtgagacttgtgtgggctacatagcaagggactggtgtatggacggacacacacacacacacacacacacacacacacagacacacacacacacacacacacacacacacacacacacacacacacacacatgcgcgcgctcgcgcacacaggcacataccactaacaactttagcttgtacgttgctgtgcattgcttgttggattttatttttgtttgtttgtttggtttttgttctgttttttgttgttgtttgattttggtttttgttttgttttgcttggcttggtttggtttttcaagacaaggtttctctgtgtccctcctgtcctgaaactctctctggagaccaggcttgcctcaaactcagagatctgcctgcctttgcctctcaagtcctgggataaaggtgtgtacaatcactgcctggctcataggtgtgtcatttccaattatagtggtatgcattttttttcacaaattactgaaaagtctttaatagccaagtctttcatttttttcttttgaaacagaatttaagtgttgcatttgatttagtgttattgattttagatagctaccttactttatttattttaatataaaatgtataatggctagaatatatgtgctggaatcaggtttcctgtattttccccaagctctaatctaaaaacatacaatttaggaatgtgctttaaatgtaaataacttttctagttggccactgttatccaccttcatgggtgggtagggaaagttggatgcctaagatttgatttgctgcatttaatggctacatttgcaaagtcacatattgccatctagtggcacaaatatattgcagctccctagattaggctagaaaatgcctagaacataggaaaacactctgtgtatactgtaaaccacacatcacaaggaaactaatataatcccaagataatgcattaactatgcacccaaatctgcaaagtttttatagaaggtagggtataccagcccacaattatatcagcttcggatagcatgctgactgcttttctgtttttcttctcattctctgtctctctctaacttgtctgctctatggagtcaacataatgccatattttacccgaaagttttgactattgtttcagtctattgtgagttttctttacttatctacttatctcatttttattttgtcttttatagaagaaacaactactttttttaaatgttgtttcgctgactgatcaacataatattatttatgatttattaaagcttgcctgaggattcggaaagcaaagtcagcctcaagctatagagatcaagcagtaatgatacacacctttaatcccagcagccatagagctaggtggtattgatacatacctttcatctaggactcaggattaagaggtagatggatctctgtgagttcaaggctaccatggcctacacaagattgatccagtcctaaagagaaacagctcacacaaagatgatctgagcacctgaaatcacacatgtttaatcccagaacgagaggggtataaatggtagaagcagggtcttcagtagacagtctcaggcattcattctccaaccacattgaggataggaagacattgaagtctcaggaatctctaaccatgctgaggagaggcaacatgctgaggcttggtgagagatcatggaaatcggatcagccctttcagcctgaggtaagaggtagtggctggctgctttgttttctaatcttcagcttgaagcttaaactccatttaagacttctgactcatttatttttcatattatagtcaggtgttattacaaatctttacaagactgtccctcatcttctacttttgttaattctagttgtccttgtaattcttgaggtttttaatttagtcaggtatgctattttccttaatatctgatgtactgactgactttgtaatgacaagctactctcccactatgaagtaaaaaacatatccttaatttaattatttatgctttatatttaaatgtttattctacctagaacatgtgtgccttagttagggttttattgcttaagagacaccatgaccatggcaaatcttataaagaaaaacattgaattggggatgacttacagtttcagaggtttagtccatttttgtcatggcaggcaacatggtagcattcaggcagacatggtcctggagaaggagctgagagttctacatcttaatccaaggcagcagaaggagactgtgaaccatactgggtgaagtgtgagcatataagacctccgagcctgccctcacagggaaacacttccgccaacaaggccaacccactccaacaaggccacacccactccaacaaggccacacctcctagttgtgccacttcctatggaccaagcattcacacacatgagtctacgggcaccacacccattcaaaccaccacaatgtgtttattgtgtaaggcattaaacaggttactgactttgttttcccctacaataacagccatttatattggcatcattcacttaatgtgaaattcttttctctctgacctgagattcctcacttgtcatttctctgaatatcttttctgttccattttttgccactttgtttatatctttgttgttttctttatagtcacttgatgattgtaactcagttttagaatatctcttagaacatctatttattatttatatcgatcttggcaaatgctgttgtaaggacattgctttgactccattgttgttcatatacctttccttgcttatttggtagtctatttagggaccatgcataatttgttgtcttgatacaatgaacagtgcttaggttcacatgaccctttcagttactatgaacagccctgttttctagtgctacaaccagaactttgccgaagccctgaggactctatagttcaacaaataccaagtcacaaatgaaggattggttactccatctggaagcttcctcccaggagttgtttctgaatcactttcttccaagggaggatatgatataccttcccatttgcagggtttgtagtatagagcatcctttcactaacacagatcccctggaagcctgagctttcacataactttgggttttcttgtcttggctggccagtagaactcagaataataaggccagttctgatgggtcatttccagaacccattgtgagcagctggctagcatcttttcctggtaacgtcttaacttcagatatgagatcattattgcttcttgccttgagaacaatagccagaaggataataagtgttgtgatattttgtttgtgctctgacaaatgaagcttgcttgagatcagagggcacagctagccactagttaaccatagagctctggaggtcagtacagacaggagacagaaagtgataaggctgggcagagagaggaggtgataaggcaggtgtagacagactctcagccctttcaccagaggatttggagaggtaagaagtgactgtgactgctcctttgcatcattcagaatttatctcaatatctgactcctctgggtttttattgataagactaattaggatcacattacaaatagggttaaaaattgttggattaggttattttattttatttttgtgagtcagtcactgtgttgcccaggcttgtcaagaactcataaactcaagcagtccgctcacttcagcctccttaatgactgtaaataatggcatgtgccatcataccccactcagataatttaactgtctggaagtctaggggtttccctagtatttctttattaatatatcataatttaatatgactctataaagaaagttggcttattgatcccctctaccctactttaggttactttttatccccaaaactcaattcaagctcatcccctccaaaagatatctccctactccccttcttgaattatttgttatcctggttttctctgtataatattttcaatacatgactcattgtgatttattaataattaaattcagcatgtcatatgtaccttagctggtagaatttaaagatcataaaaaatagttgcttgctgtctttcccactcctgttttcctaggagtcttcccaggatctcagaaaccataggctgtcagtcttatctaatgactaaacaaatggaagagaactaggaattgcagcttaaagggcattcaatataaagagagacactgctttagagagaaccagttcttagcaaaacgaaagttggatatagaaatgacttttaaatatgggggactgaaaatagattatcttggcaggagaggctttgtagtgggaatttcagggtataaaagtagatatggatttggaggagtgtgtggtgtgctgaatcttaacatttgttaaaaaaagcagggatgttatttcatgaggaatactgaatcaatctttgaaaacttgtttaggcacattggatggtaattaactttactcaattggatttgaagaaaaaaaatctagtagaaatcaatggaatattactgaaaggtcttttaaccttaacataaattcattttaaactgattcttaaaatatcagtaagctatattgcaaagtctgtgaccttggtgtccagatgctgttgtatgactgtgtgttctctgaagggggacactgacaacatgccagatgaaaatacctcccgaaacatagattggtgagccaaacaatgaccttgattgacttacttaaacatgggtgactggaagtcaactgcattcaaaaaaccaccccagcaccggtgacagctcctgaaagatgtattcctgcagttcaccagaggctttaccttgtcattaactgcatttataactgtaagaaggagccgtgtaagtcttgtaattttcggagctccctgggccttccaagtttacctagctcccttagatgtatgggcttctggtttcccacttcccaccagaagtgaatgtttcaatttggaggaaaaagctacaaagcatgcactttggaatacggtaaaacattgccctagtgaatacactgatcctccttttcagaacttctagatctttccattatagaatgaacaaatcagatcaaatagtttaacgtaaagcaattcaagtgtttgatttctctttgacattgtgctgtaaagattttgactcaaagcacagaaacagttcttttgttgacccagcagcatgtttcattgctgaaggcctccataggacaggaaggaattcagtttctccgtggatataaatgattgtgcctaggtgcctacaagcttctgaactgagatctcaggcatagaagaagtaaacaataaccagtgattctctttgacttttaccttttatactcacctcatctacttgtctttaaaaatatattagttgcaaaaccacagatttggatgcatttctttttatttttctatctctaaatgctagaggaacagcccaacttgagcttttcctccgtgcaaacacaggagccaccagaaacagatgagatggccattgctgtggttgaacatagtttgagtgtgaagtgtccccggaaggatcatatatatgatatgggggtcctcagctggtgaagctcttgggaagctggtgacacctgtaggagacagagtttctctggagcaagtaccccacagaagctggtcttcaggtttatagagaagttgtttccagtctgttctcttctctttttcccctgagatgtaaagatttgaatctgctcctctaatagcagccatggagcccctgtcaccattccttcccctcttgctgtgtacttccctcagaactcaggactatttttcattcagagttcttttatagcagaaagactttaaaggagataacaaaactagagttaatgtgagaggaaagaaaggagagctagaattcactgaattgcatcattaccaccaactgagtcattaaatcagattaagcatttttcctatctgaactgacaaagacattttaaagatagaacacatttaagaactaagatgttggctttctggcacaagtttctgacgattcatataaaatgtgctgaattcaaaattagaaagtactgctgtaattactaacttaaagtatggaattttaagcattaggcttgaaagagacagaataataaaggaaaggagacattgcagcatttttaactgaatgagctcttgcctaagttcttttctgtttctcataacagtatgttatttgaaaagttttgtgccataccccatcagagtatgagacatgctgaagccctgtttcctgagactgacattttctcattctgacttgaatgtttacttctagaaaagtatagaagacatcttataaaatattttgagtaactagaaaggaacacttgtgtaatttttactggtatatgtcacagttggtttgatgaagtctttcaaatattgatatgttacaaatttgctatgaagtagccaaaaaaatcactgtattcaaaggtgaattgttagatttttttcttaaaaatttataattttgtttgccaagcacatatgaaattttactctagaaaaatgaattaaaatcctgttttatttttaacaatggttatttattcagctctacttttacctaaatgtgagttcattttcagtgtgcaagaaattttaagtacagtggcgaagttaacaaaaatttcaagagacttttattcaagtgtgctgaaaagaattgtccatctatgtgagatgatactaatagatgagaccaacataccatgctacttgataactaacagtagggggagaaacagttagagactgtgtgtaaggatggcgaatgataaaaggaaataaagaaagttagagtacatgaaaaacacaaggagggtttggttgtattccacctaagcagggctatgggattatggcgagatgtgacctgtgagactctctggtgggacatcccaaaagaaggaacaggaaatggccactgaggccaatgtccaatctgcagagaggatagttggtgggaaataaaagcagagaggaagcaggggactatataccgaggggtgtgtggactgacaaacactaggctttgttctgcatcagaatgagaaatgatatgatatcacttggatttgaggagcctttatattgtatttaaattaaactttaaaaagtgctttccataaagcatttaaaaagctagtttattttttaattgaaaagttattatatgtctatatggggctcagtgtagtactttaatataggtgtacgttatagaatgatcaaatcaaatatatcctaatttttaggtattttcctaatatcttgttataaaattctgtcacagacataatcctgttatcaaaacatacagaatacacatgaatgctttattatgtaaaagttagacctttttacctgcaagaatcaagttttgctctgtgtgggagatacccagtcccaccgagaatggcaggttagagatgattctttaaatgcatttctctgtgaaagatggggctggtagtagggttggttttgttgctttggcttgtagttttaagatgtgtgcattatgtttgtgtgccaatggagagacaatctattaaaagagaaaaacaggtcagatagaagcaaaccagaagaggcacacacagcctggtcctgaggaaacagaatgggcctctgttggcagctaggcacaatggagagctcatgagcacaagtggaggagacttgtgacctgtggaaatcctgtcctgattgacttgtttccaaaatagttagctgagcttgaagatgggctcagatattaaaggcttgttgagagaagagaggtgctgtacaatccatcacactgtgagctgagtggaaatcggagaactgggcagcaccagactcttttgtgtcttgggctcagtgtgagcctaggacatcagcctttttttctctctctgtagcctttagatcactggttctcaacctccctaatgctgagacccttcagtatagttcctcacgtggtgctgaccccatccataaatccttccgttgccacttcataactgtaattttgctactgctatgaatcatgatgtaaatgcctgatatgcaggctatctgatatgcagccccctaaggggtcacagccacaagctgagaaccactgttttagatgctttgaatatttgaatgaataaataaaagaatcaaaaggcaaatcagcactatttgtgttgctggagtctgaggtgtttttcagtttactacttacgtggttttaattggaatgcttcataccaagcactgctttctttcttatgatcaataattaaaatcagcaatgctctgagtgcccttttttggttagtgatatgaagtaaaacgaaacctagttttgaatatgtatgtatgtgcatatattatgtatacataatatataattttcatgtaaatgaaacaagaattaaatgttaatttggggggatgtgacattcattcttcatatatttctaaaattctgagctatgcttaaccactcatggacatgtttatatatactcatcctattcttggtctgccatgtcttcccagtcacaggggggatgaaactgaataaaacatggctcctacctctgagtacattgtagccatttggggcatgtatactctttcttagactatataaagaggatatactcaatgtacttaggaaactaggtttctatatgacatcacatagagttatcactgaaaaatacagaatgatttgaaatttataataagaactaaaacatggtcaattcagcataggacatacaaagtcttcctgatagaggatttgtttctttaatagatgatttgctcatagagtctgctttgttattgctataattgtgtactttgtagagtaataattagaaataattattaggttattagagttgcttggcttttttgcaagatcaattgggccctgggtggtttacatataaacatgacttcagccttctgaggccaaggggactcagaactcttagactgcaagacacaatgctgaactgcaggtggcgccatgtgtacattcttttgagggccagtgcctcaggcccaaaacactttgcattggttctctgcgaatattacaggtgcatcccaggattctattttccctttagaatgctatttgtcatgccttgtttgccaagcaaggtacagaaaataaataggtagtttacttatgcatttcttagcagtcaaattatcagaataaactccattgcttaagaaacacatttagttaatggtttgtctatatagattgttgctaggtggaactttagttagacaaatattatttttaaaaaaatctgatagatcaaggttctatttgtctttataataatcccttccccaaagaagtaagatgccaggttaccagggttccagtgtatacatagtattgtacatattgaattgcgagttgatttgctatgattttaacaatagatgtttgaattaaatgtttcagtctccaataacttctatagggaaatttctttatgtagtttcctttacatagcaaatacaacagaaagatatttaaaccatacaaactgtgtgtgtgtgggaggggcagtatatgtgcctgtttgtgtatgtgcttatatgtgtatttgtatgtgtgtgtgtacttgttagtatatacattgtatatttgtgtgtgtatatattctcatcattaaccatcaggtattgaggtggcatcactccatatctgaaatttcatgtaacggcatataccattgtctgaggggccagcctccagcagcacagggctcaaagggaatccacagagttggcatgtactatgactttttctctgaggctgttaagggaaaaaacactcacactctctcctgattatttccttctttattcttctctattcatcattctgtcttccatattccattttcttagccctatccagaaatgccccttctatctctcttgatgttttccttctccttctctcttgacgttctcccaattttctcttccttgatgtttttcttctaactctatctttatgtttgatgtttccctcctaattctctcattcttgaaatttgtcttctaactctatctttatgtttgatgtttccctcctaattctctcattcttgaagtttgtcttctaactctatctttatgtttgatgtttccctcctaattctctcattcttgaagtttgtcttctaactctatcgtgattcttgatgtttaccttctagctcgagctctattctttccctttcagcttacataccacagcagaaatattttaggcaatatagaaatgacattttattgtttaagtgaattattacaatgagtacaggtgaaaaaaaccatgtttttcatctcccttacatgattaaaacaaagtcatcccaagaacacacatatatttacatctaagcaacctgttacagagtaatagagtatgagtaagcaggggtatttttctcaaccatttttttttattgtcaggctgcatattgcagttacaaagaaagaatcaataactttattacttaccttgaaaggcaaccatgtaaggaatcttaaaaagaatcacaaatctcaacttttatacgtgaaaaacagtcagctctactttaaatctttagggtgcatacccactcatcaataggtttttatatcaggagattgaaggcaaaaatgggtataaggaattgatcatcacctttggtcattaaccaatcctagcaagaaaggcacatcaggtaatgataattgggctgctttgttcttgttccctgaccttaacaagttcctcactcaactatgtgtctttctaaaactttagattgtcttcttgggtttttcacctcaaagctatttacaaaaacatcttagtctaactttaagctattttcaaagctttgtttcagctgtgatgcattctgcaacctgtgaacacatgtaccaacattaagattaaagaatttgagccagcctgtcttctggggactcaatcattttccttaatcattaacctgaactttgatctatgcagctccttaggtgaaacttataggttgtagctgtgtaacacttccttgtgtttgttttttatcatcaaaactctatttaaattattattattattgttattattattattattattattattatttagacagtacagccgtaggaaggaatcatctttataataatccacaggtaaaaatgcccagtagaatgggatgtttcgacgaaagaaacaggctacattacaggcagtgaggatctccccacacccattcacaccatgccagataccagagtaagacagcaatatcaaacatgtgagggcacagcaaaagacactctacagtctctggtcttgggccttacctatccaagatttacccaacagtgttttgttttctgatggcctgatcccctgaagtcaattgccatctgctgctcctctgacatgaccactggcaggcatactgggggaaaaccccagaaacagagtagctcttataagacggccgatgtgtagagcaatttctcatctgaggcaatttgcccctatatatgaacattctttcttctcttgtgtttattatttttgctgtcattagaaacacctgcgactgaagtacttagaaacaatttggtttcacttcactccttttgtgctatccattcttatatgatcagatgggaatttagatcttgagtgaataacaatagcaaatatgagcatctgatctctataatggcctattagcaatctttgtgtgagtatgtgtgtgcgtgtgcatgtgcgtgtgcgtgtgtgatcagtatttgaactgagttacttgaacacaagttcagaaagtatgtttagtttactttctaaacatactttctgaacttataggcaagagaaggcattttactgttaattataagcaccttggttatgagtttatacctttctttataaggctagattttgaggaaataaatcaggattcagatgaaaatttaaaaataattgttattctgtatctttaataatctactaaatgggagtttcttgagttattttctattactgtgtagtgcgccaagtaaatatttcttagattcttttttaattaaatagcaagactcttaatattacatgttgccagaaaagttccctccactttcagtctttgttttcaattgctccatacccaacattacttatattgtgttgaggggtagcaaaaacaaatagcaacctttttattctgtcccattattaaccattccatgatagctagaaagatggctcagcagttaagagcacatgttctctttcagaggacctaggttctgttcccagcacccacatggtatcctaaaaccatccacaacttcaatgtcagggtatccagggtgttcttttgacttgtgggcgcatcaagcacatgtgcaatatatatacatacatgtaagaaaaacattcatacacataataaaaagaaataaatgttttttgtaactttttattagttcaaattaggaacaagattgcttcacatgtcaatcacctctcattttccctccccttctcccacaccactctccctctaccctccccccatccaccctccactccccaggcagggtagggccctccatagggactccgcaaagtccaccacatcattctgggctgggcctaggcccttccccatgtgtctaggccaagagtgcatcccttcacatgggatgggctctcaaagtcccttcttataccagggaaaaatactaatccactaccaggggccccctagagtgaggaggcctcctcattgacatccatgttcaggggtctgagtcagtcctgtattgacctcccagacagcagtctggggtccatgtgctcccccttgttcaggccagctgattctgtgggtttctccagcctggtaccgacccctttgatcttcattcctccctctctgcaactgagttccagagttcagatcagtgtatatctgtgggtgtctgcctctgcttccatcagccactggatgagggctctagagtggcataaaaagtagtcatcagtctcattataggggaagggcatttgggttatcctctccaccattgcctagattgtcagtttgtgtcatccttgtaggtctttggaaatctccctagtgccagatctctccttgaacctataatggctccctctaatatggtatctctcatcctgctctcctctattcttcccccaactcaatatttctgctcttccatttcttcctctcctctcctctcctcttctcctcctctcattctggcagctccctctcccctaccctcatgctcccaattagctcaggagttcctgcccttcccattcctggggtccaggcatttttcccttagagtccttgtttcctaatttctttggtgaagaggattgtaggcttgtaatcctttgctttatgtctaaatttcatatatgagggagtacatataatgtttgtctttttgtgactgggtaacctcactcaggatggtttctcctagttccctccatttgcctgcaaatttcaaaattccattgtttttatctgctgagtagtacgtcattgtataaatgtaccacattttctctatccattcttcagttgaggggcatttaggttgcttccagttctggctattataaacaatgttgctatgaacatggttgaacatatgtaaaaacaatgaggttaattctgtattatcaggaacaaattctgcagtcttaatgtgtaacacaactctctctgcatattgggaatcagtaactatattaagaggttctgtaaaatccataagtaccatgagaattgcatataattctgccttctgtacagatgtatatggactttgaactactttacttacctcacctgctttataacctgccttacctgatttgttggcatcagtgtagaaggtaagaactccagaaataggagtttgtcttacaatactggaataatccagactgtcttttttatgaatttaattctgtcagttttgggatagttgttgctaattgttcccaaaaaagtcagtaagagctatttgccaatattcattatccttccacaaggaggaaatttcttcattagttaaaggtactataatttctgctgtatctttcctagtcagctgacaaagtcttaacttacactttaaaatcaaatcagaaatcatttctatgtatgtctttaactttttgttctgtttatatggcagaaatatccactacaatatagtgtcttccctctgcatcagaattccagaagggtattctctggatggcaagataaccagaatacagtctaaattacggtttatccaatctacatgtgcattcaatattctgttttctacccattgtaactctttttctgcctcagcagataatactcttggactgtttaggtccttgtcacctttaagggccatttttaaatgctttatgtcatgtccttctacaccaataatcgtctgtaattgagaaatttcccctaataatttctgaagagaattaagagtttgattccgatctctcctaatttgtacctttttaggtctgattctttgtaaatctatcttgtaacctaaatagttaatagaatctcctctttgtatcttttctggggcaatctgtaatccccaatgaggcagaacttccttcaccattacaaacatatgttccaaagtttccttattagaatctgataaaagaatgtcatccatgtaatgataaacaagagattgtgaaaatttcttacgaattatttccaaaggttgctgtacaaagtgctgacacaaagtaggactatttagcattccttgtggcaaaactctccactgatatctcctaactggctgtgaattattaagagttggtatagtaaatgcagatttctctctatcattttcctgtaatggtattgtgaagaaacagtcttttagatcaatgaatatgataggccatcctttaggtattaaggaaggtaatggcattccaggttgcagagagcccattggttgaattatcttatttacagctctcaggtctgtcagcattctccacttacctgacttctttttgataacaaatacaggagaattccaaggactggtagattcctctatatgtccagcatcaagctgttcctgtactaacttttctaaagcctctagcttctcagaggtcataggccattgtcctacccaaactggttcatctgtaagccacttcaatggcagggcctttggctcctctgaaggtccatcatttgtacctagtttctgtacagcatggatggttggtaaccgttttccatagcgtcttaccagatcttttctactatctaaagattgtacataatttgtatctgacactggaggaatattaatctgagtattccattgctgtaagagatcacgaccccagagatttatagctatatctgccacctatggtttcagtatccctttctgtccttccggtccaatgcagaacaccgagttaacactctgtcgaactctagatagagttccaattcctaataattgtacatttgcctctctaagaggccatttctgaggccaagacttttgagtaataatagttacatccgacccagtgtctactaagccagaaataactttattattaattttcactttcaactgaggccttttatcattaatagaagcttttcaaaatatgcgtttctcattttgtccattcacatttgattcttcatcgctattcaaactgccatctagagcagtatcatttttcacaataggcaaagaatggtcctgtgagagattgtctcccactgctactgggaatgacccaacctttctcgatgtgggggccttcttgagatcctcctcagggtttcctgaccttaaggggtttccttgtatgtccctggtcgatctacattcattggtccagtgtctgcccttaccacacctctacacaatccagaaggcagtggccttccatatgaggcattgttagaattcatttgtctacaatttctcttagtatgtcccattttaccacagttgaaacatctaggttcctggagccttcgtgatctccaggggaaggctcttcctacccaaggttctggttcatagtagtagtaacctctgggctcttggtatctatgttgacctctgtaaagtgcttctccttgccaagcccttacatcctcacctctagacctgttgcctttaatttcctgttgccattttaaacctttggagatggttctcctacccaagttccagtatcttgcacattatagtcaatgttggctgcatacaaaacccattcttctagcggagctgatctgatctttaaaggcaaaagtattcttttgcatattgggtttgcattctcataagctatagtatatataattgattgtcttgtttctggatctgttacctgtaattctactgccctagttaacctttgtaagaagtcctggaactgttctgtaggtccctgttctattctggtataagcttctaggcattctcctggctcaagaacctcatcccaggcatttaatgctgctttcctgcatagagacagtatatcgtcatcatattaagcctgaacctgtgggtcagcataaataccctgaccaagaagcttatctagaggggcttcaaaaccttcctttatgccctgacgttcaaggagctttgcctctgcccttactaatgccttccactggatttggcatgaattctcaaatacagctgctaccaatcgttcccaatctgtgggtgtcaccctgttaaaggttgcccatgaatgtaatagctgttttacatatgggctatggagactatatgagacaactgattctttaatattcttaagatccttcagctgtataggttgccattcataagccatcgtccatgagggtgtttcttagaagctggcttttctaccatggtagctgggtacactaatggtgtacgagtaacaaccttagaagtatagtcatgatacctgagtggggtaggtgcctgggattggggtgattctgcttctgaggtatcccaatgatctttaagcttagcaatgatatccttttgaaaagtttcaatctccttaatcataaaagattccaagcatgttagtgaatctgtaaattgctctaactgctcatctacatgtttttctaggtctttaatatgatcatccttaggcagcatctggatggcacggaaactgccttctaggtattggagtctagattcgaggtcatgatttgctgattttgagtcctcagcaatcaactgtatggacctatgtaatctgtcagccctgtactgtaaattatcttctaaacattcaaatctagactcaaatttgtgatctgctaccttggatgcttcaataattgattgaatggcattgtccaattcttcaaccctatcctttgcatggtcaggcacacctgtagccagcccctaagtaggcgtggattacagcttcccctacagggtacagtcgtctggcttggcatccctgttcccttagtgtttgtaggacatctatccaggtccttctggttttcaaagtttccattgagaagtcgggtgtgattctgataggtgtacctttatatgttacttggcctttttcctttgctgctcttaatattttctctttattctgtaggtttggtgttttgattattatgtgtcgaggggacttctttttgtgctccagtctgtttggtgttctgtaagcttcttgtactttcataggaatatccttctgtatgttggggaagttttcttctctgattttgttgaatgtgttttctgtacctttgagctgtatttcttcaccttcttctatacctattattcttaggttaggccttttcacagtgtcccatatatcctcgatattttttgttagggatttgttggacttgagattttctttggtcgatgactgtatatcctctagcaagtcttcaacaactgagattctctcttccatctcttaagttctatttgttatactcacaactttagttcctgatcctttatccagcctttctatctccagcatcccctcattctgtgttttctttattgtgtctatttcagctttcatgccttgagtgcttccttcacttgtttggttgttttttcttggctttctttagattctttaagagctttatttacttcttaaattttttggtttgtcttttcctccactgcatgtaattttttgcttgtttttttcctttatttctttaagggattttcttgtttcctccttaaaggtctctatcgtcttcctaagataatttttgaggtccatctcttcttcatcctctgtgctgggcttttcagatcttgctggagtggagtccctagattcttgtggtgtcatattggtctttctgttgttgagtgttttcttactgtcttcttcccatcccttcttccagtgagtgcaggtggggtctctctctctctcctgtggcaggcggagagctcagcctctgttggcaaccagatggcagagggtggtgggtggacaagggtgaggtgtgtctggactcagggtgggccttcctggtctgggcaggtccactcttgcctgggtgggctcaggcagaagcaagcaggggttaatggggaaggttgggagggcagagaagcgcctagactcacctgaggatagagcgcctgctgcaggacagagagaggagtgtggataggggtgaggtgtgcccagactctgaaataaatatttttttaaaaaagaaacataatttgttctgtttgctttcatgatggctggtaaaatgattttttttgaaattttataaacacaaccttcatttctacacaaacaattactattgtacagtaaagccactggataaatacaggagggatctgggtaggatttttctctagatttgctgctgctggtgcttttgcttttttgtatttatccatagagagaaagtaattcctaatggttaaagtacctaaatgtaacctaaaacttctataaagctactagaaaagaaaaaaatcaaaagaggaaaccccattaagttcgtctggattgtttcttggatagaactcaaaaggcacaggcaacaaaagcagagacacataagtgagtttgcatcaatcttagaaactctacaaagaaaaaggatcaatagtaaagagatttgtgattatagtacatatataataatgcaaatacataatgcatatacatcaataatttaattccttttgacagcaggaactgtgccttcatgtttacatctaagcactagcacaatgataatgttaacatgataatgataacatgtttatttaatgaatgtacttctgtaatctgttgttctttcaatgtgcggagtaggaaactacatttaagctaccatgatgtcagattcctgttatctcaccattgaggagactaatgcaagaggattattagttcaaggctaccctggggtacctagtgagactctaccttcaaaacccaataaatatgtataaaatgtgtgactatggcctagcagtggtggtgcatgctttcaatcccagcactcaagagtcagaggcaggtgaatgaatctctgagtttacagccagcttggcctacagagcgaggagttcaggacagtcagggctacacagagagaaaccctgtctctaaagtaagtgactatatatttgtaattatttaaaagtgaatacaactggttatctcatgaggtttatcaaaagtgagttttaaaaacttatttaggactcatgcccagtacttgggagacagaaccaagagggctataaattgtggacctgatccagtcaaatgaagaaagaaggaaaggaaggaaggaaggaaggaaggaggaaagaaagaaagaaagaaagaaagaaagaaagaaagaaagaaagaaagaaaggagaaagggtgagagggagggagggaggaaaagagaaaggaaagagaaaaagaaaataacacttttcttttttatattgagaaactttgaagttattatttatttgtgtatttatttttatcttgagcaaagtagagaacactgatcaggagataattgcttctgaagtcaaaataattgtaaagtaacatgtgccccaaaaatatagctggaattcattccaaaaaatttatttaggtaatcttttaaaaaagctagtatttactaaataacaacaactccttaaagtctttacctcaaatgcttattctacatttatagcttggcctgctcatgtgaatatagagaataatcactttttgatatctggaggcatccactcagatatgtgactagtggcaaaacaaagtggagacaaaaccagaggaaactggtttggggccacgagtgaaattaaaacatagttcaacatagttcaacagatggttttacttgatgtctcaagaactaaatggaagtcacatgaagcattctcagcaatgtttaagaggcactggagttaaggagtatattgagaaattcactttttaattttgaagatatttttaaatgatctagtatttatttccatattgtccatagtagcttacttatcaaatactttttggtctggccacgaggctttcattcagggttcaaaaggaaatgccacaataagcataggatataagtctgagggcagcagaagagaatcttctcacacactttctttctctacatgtgctctttattgttctctctttactgttctctgttttaattcttttgtcctaatgtctataatttcttatctctaatcctgtctcaattctaattctctgtttcattctttttcattttcctacttacttatttttcctacattcttatctctttacacgtctgctaatttctgccagctctccctccagctactaccttttaagtctcctcttcccaaatctctctgtccccagaggcttgaagcaaaagataagaattacagagtttgcttttcattggtcaggatcacaatcctagggtaagcaagaaaggcagagccattgccatgacagcatgagatcccaaggccataaggagcaaaatctttaatagacagggagggcacattgcccagtgataactttaggacataagtctattgttagtagaccggcaaatgaataatagccatacaaggttaatggaaggttaacttaggacaacacttccctatcttctggcagagagaatccaggacactcttgttctctgtgtctttgaaagctatggctcaacaactttaggcatcataccataattcttgtcctcaagcatctgtgaatgtctcagtagaggtctttttgcctgaacactaacactgacccactatctgccaaggaagataactacaggggagcagacttctaagtttatgcaaagacctgcttataaggttatcaactgtgattattttcttactagaatcctgcattgctggggtgggggagttacccaatatactaatgcacaggggacaatgtgcccagtaaatgactaatacattgctagaatttgggggattaatccaacatagaaagggagtgccaaggcttcacatggaatttagagtaaggactgtgactattcataaagcaaatactcccactgccctgtgtgtgggcatcctccattggaatgtgcaatcctggtgggtaagcttcgtgatctgtcagctgagctctcactgcataattctgtggtccatagcacatactcagaaagaacctctaaaagttttgatgtacttcactgtgtaagctactcagcaggcagatattcagcatctgttagactcctgcatctggagcagcactcttacattagttagatacaggatctgctgtaaacacataacagtgtagacaaaacagaacaaatgagatgagatcaaccagatgtaattaattccaactgtgtaaactttagtgagacctcatcaaaatcccttactcacagacagttgtccttcaaatgaattagaagactaagagtcaacatggtcagtttgaaggcttttgtagatgtgttgtactaaaagtagttaagtaagaaaataaatatcactctcagttaaccctcccaattaattttatttactactattactactaccattgtgcgttatacatttttttctttgagacagaatcttaacaaaaactcacagcagtctacctcagtgagtctaggattatagccatgctcattcttggttaaatcttcatcactgaaagttgtaaagaggataacagttattggggatttgtacaggaatcttggtaataacactggtgacgtatatggcaattctcgagggattatatagcttcagcatgagcaaaactccaatattgcatccactctgatgtacaatgctaacacctcctgaaatagtaatgtttcataataaaaaacatccaagttatagctgagggcttgcttagcaggagagacatggtttgatcctcagctccacaaatgaaatataacatatcaattttcatattagagtcatgtgctcttacagtgcttatacaccacatgtacacgtattgcatagcccagctgtatggtaagctgtactgtctaggtatgtgtatgtatcctatatgtttaacagtgatgactattcatttctcccaatgtatcctctcaatccccatgttataagtgacacatgacttatatgatttttcataataaaatcttgccaggaagcccaaggtagcatggaactcatataatgtagggtggccttgaattcataatatgcctgttttttctactgaatacagagctgacaggcatgggtaatcctgatcaacctatatatacttttaatatgatagtgatttcttatttagattcaaattctcagttatggttgaaagtggtattatttaagatttatttaagatgtgaaacgatgttttgatgtacatatacatcataaaatgtttactactataaagctaaaaaccataagatattccatatatagtgagtaatttagtctttacaagaatttgcagatgaggaaattcaagattaagtttacacagcccaggggactgaatttgtaatccagaccacatgaatccatgagccacatcttagctgtcacaacacactcattatccgtgtttatattgcttctcatagagaaaaataagtaaataaattagaataaaccgaactttggctttgcagcttgtggtagaagggcaaaatggacagttttcattttatatattttgatttccaatgtgccagtcagcatgtctgcatgctaattccaggaacttggcaatgtgttttgttatagggcaaacaagactctgcatatgtaattgttaatggttttgagatggaaagattatcctgtggaccaagtgtaatcttacaagaagggaaagaatagggtaagagtcagaatccaagagggaaatgtgatgacaggagcaacattcacagtgatattcctgctggccttgaaatggacagggggttgacaggcaggaaatggaggaagcttttggaagccagataaggtgaggtccgtgtccttgaaaagtgtatcaggaaaaatgcagctctgtgaaactgcaattctgttcttaaaagatatacttcagacttctgagttgcagaactttcaggtagtaactttatgattttgtagcttctgtgtttatggtaataaaaaactgatatagccattcattccattggaataaagctttgtaatttttttatttttaattacagtataattacatcatttccccatctgtatctttcctccagcacctctcatacccccctttcaaattgttggcttctttttctttaattattattgttttacacacacacacacacacacacacacacacacacacacacacacacggataaatctgttaaaaacaacctctgacttcatttactgtttcttgtatgtatgtgaatgatatttttaatgaaactagctgattctcctgtgattatgataatagtattaaatatcgaaaccttttctgagtcttttatgtagataccatttatgaggaaaatttgtctctctcttgtgtgtgtggcatgtatgtttgtctgtctttctctttcactattattagtgctctcctccagctaattgttttataattgtagttaacaaaaaatgatagcctacctcattctaagaaagttttgagcaagtcattgggaaatttctaggaaggtatgtaatttgttgcatatcagctccaagtgcactgtaggccttccacgtgatgtctctttctttcttcatttctttttcctttcctttttttccttgtccattgcatggtcctggctcttgtctaaccattgttttagtttcttaataagaagtcaattaaatcagaacttgaagcctttaaagtggtgttgctgggtttgttattatctgaaaattttatttaacatactctataataatatgacacaattaagaaagactttcaacatttcttgcatagatgattcttaatttatcactgacatgacagaattttatgagccacaaattagaccacacaatttctttttcttacatgaagccagtaatttgggctatttttttttaacaattattattatcacagctcctcagtggtgctgttttcattggctcactcgttgttttggataggaaagtcagaatacagtgtctgttcctagtgaaaaaaaaggcagaacttcattcttcactttgttgattgcaacataaatcagtgcactacctccattttgacagttcagaaattttagcagccataagtttagaggcttatacttttaagttctcaatcaattcagtgaagaggtcaccaaaagagttaaaagtatttacaattgttagaaagtctccaaatgggcaacaatgttaaaatattttgataaatttataaacaacattattatcaggtagaagaaatgaatacagaattgtatctgttgatgactaacaatctagagtgtgcctgaaaagcactgttcatctagatacactgaagaattgtgcaattgtcctaagtagcctttccctcctataacccaaataagcagctgaggagaactgacactttgtattgctggactttgaaataataagtaggtgtgggttcatgaatgagataacagtactctaggaaacagaacttccattctttggtatattcagatgaagaatgcatttcaggctcttttatgctttacattagaagcaggaccatggggaggatgctcatgtacataaagcaaagttttgagctgatattgcaaaataaaggcttgaaagatgatgtgtcatttgtatcatgcagtatcaaatacaaaactggtgttccttcatgaacatggagcagcctcatttggtgtctgtttgtggactcagaggtgcacttagagtcaaataaacactgtcctaccagagttgcttttcctttatcacagcggtagaaacccaagacagctccacaagagtgcactccgagtaggaagtcattcatgtgttcacttactttattacatgcttgatcttcgctggttagaatatggatctaatttttaataaactaaaactttggtaaaagaaaagagagagaggagaatacaaacaaaactccactggtagtgcatacacatttcagagtatgaaaatttcccaagacattgaaaagatgcttatgttgtctcataaattatacaaggagaatggcaaaaacaaaaagatttcagaaagaggaggatttatagattagaaaacttaaataagttttagaagaattttctcacatgtaggtgtccatttttgagatttatccatattttctacagtgtacttcataaatgagaacagagggaacttgggatcctgtgaactggggaagagaaaatgggttggggaggggtaagcatgatgttaaggctcaggggagaggctggtacatcatcaagtcagcaaaaagtttgaggaatttgactgaaaacactgagcaaagggctatatgatacctgtgtgaccaacgggaaccataaggtaatgaggatacacaagttgtggtcagtgaaaataagcctacttctatttaagcacccatttccaaaaaggatcctatccatatttttgttttattttttttcctaactgggcattgaacctgggctgttactcatagtagacaagttctctactactgagctctatccataccattttgcttaaaatagagtctcactgagtttccagccagtccttgaatttgcagtcttcctgcctcaacaccactagtagctgagactgcaggcctgtgccaccaggccaacaagaaatgattttatgttattctagggaaatgtactcgaaagtcccttgagatgccttagcatttttattgtatttcatgattacatttcaagatgctgattatcttatttcttataaaactctgagggaagccttcactgatctcagggcccttcataattaaatatgcctcttcagcaataattttagtatctattatcaatgctcaggcccctggaagttctgcagcctcccagctttgatatcacttgtggtctgcagactctccagcagtgctgtctagtgctcctgaaaatagtttctaaatgcttaatttacactgactggaaggattccatcttttcctagcaattgaatttcccaaattaatcatttaacctttcttgattcatgcacaggccccattgtggggtcattagtgtcctaccaagtgtcacttcgtcttcacagaaaaaggtcaggcctagaattatgaatgtgtagtagaagaattgcactccgtctttatagctaaacaaatgcaaataatactatttctttccaaatgcacttagtgaatcccataggagaacccaaaaggaaattctctgctgtttattcccaggcatggcttctttctcttgtcactgaaactctgtatgggtccaaacacccatacttccactcagcgtcatacttgatctctcagaatattgggtctaggcacttaggaccctcctaggttatgagcacaattctccattccttataccaggggatttctaaattgtagggatctgcctttaatcaagccatgtcattaagcagaacttcacgaaggaggttcccataggcacataactgcacttccatgcaaaataccaaacactttctccctcttccacctgcctcctggagatactttagcatcttggagtgagctgtgggggatgctgttcccttcattcctcttgtacctcacacacccatgagggatggcagactattagggcagatactttctctttaacgaccccaaaatgagcactaaaagcagagaatccttgtttgtcccctgtatttgttcacagcacaacaaaaaatatttctctttgcctaaagggtcaatttgacctagacccggacctgacaagaatccagaagcttaactttagtggctaatggagctggctgttaaaagccaaataagagaggttagaaatattcctctttaaaaccctaatcctctagccctgacttcccagtttcccagtgcaatgtaaaacagtatgtgctcaagccgagttcttggagccatccagaaagggccctctgctccttctcctgctgtgtgtagaaaagcaaaatggtgagtgaatgtgtcagatactgtaggttatgtccacgacaaactatgtatcaataagaatgatgtttaggaattcaaggatacagggctcacttcattatgtttcagcacctcatttcaaataactaaggacagccagaatctgtcaaaataaacccaaaatgaataaagtgaatgaattacgtggcaatggaaaggagttaaaatatgtacatggacattgtcccttttcatcctctaactagtgttgttgtggttgttctttccaagtattgaacttttagtttgaacttaaaaaacttggggaattcaatttttgcattgctttatatcccattctgaaatacacagtttcaattattctctccattcataatagaaatgtcccggatatagttttcacagtcgacagttctttcatatgtatgaaaacagctgcaaatgggatttctaaaatgcaagccctattttataatgtttcattcagaagactaatgaaaactcccttctttgtgaagtaaggagaaacgtatagtcactatatcattcagatgtgatcgtgctgagatagaaaccaagggtttcactgtggatgaaactcaatgggcagagtgctggtctcctactccagcagacctgtgtttggtcctcagcttattaaagtggggagatagaggtacatagatctgtactctatttcagaggtggaagagaaacaccaacctcagccagctcaaggccatcctgtcccgaacacagtagaaaccttcgggatccaaaactcaatttctgatttgagacagcaaattattcttccttctagcacattaccacacagcactttagtttggaacctatgaagtaattatgtgtggcattcctacaaaataaaaagacttggcttttctattattcataactagtttatcaaaatccatgattttcttaaggaaatttgcattcatcccacaattctcaaaatatttcaactaaaaatataaaattattaatgcttcaggaatttcacacatgcgtataatgtattttgatcacattcacccttcattcttcctctccttgtccctgatacaggccccactccccccttttatttaataacttaccaaatccaagttgttctagtcctatcccatgtggctgtggggccatccactggagcatggtcaatctcccagggactacacccctaaagaaaaatgtcactctgtcccctaggagccatcgcctgtcaatatctccttagttagaggcaggagctcatgaacctctttaccctccatactaagtgttaactgccttgatcttgtgcaggtagccacagcctccgtgagttcctgagtgtacccggcagccaagcctttagcacatgaatctttgcagattatttaagatccatgccatgacacatactactgttgcttccaaacagcccttaaaacataggctctttagtagtaaaaatgtatcagccaagtaagagttctctaattgtgagaaaaagcctaaatcttaaaaattggataattattttaaatcatttttgtcacagtagctttaacatttgaaatcataagggtgttatcctgatgaaagtgacagataatttaattagtttaatatatctttttagtttataattataaaagttatagcacaatgttgttaaaatctattaatgaaataaatgaaaagtttcattttaattttaaaaattatctataattaaaatgtcattacatcctttccatttgtcccttttcttcctccagccatgtgccctcccttcatctctttccactcttcccttactctctcttgctgtggaacagccctcccatacactggaatgatctgtcactctaattggtttaataaaatgctgattgaccagtagccaggcaggatgcataggtggggcaaccagactaaggttaatgcaaaggagaagggtggagtcgggagacactggccagatgtggagagggcaagatgggcattctgtactgagaaaagataccgccacattgcagagtgtaaataagaaatatgtgttaacttaaaatgtaagagctgattagtaataaacctgagctactggtctaacatttgtaaataacatgaagcctctgtgtggtaatctgggaaatggctgccaggtatttaggacccaacggctctgagacaggaaacttctgcctgcacccttccaaattcacaatctctttttctttgattattatggtcacgcacacatgcataaatacatatatgcaacttgttgagactgtttagtgtttcttgtttatgtatgatttcaaggctgatcatttgctattggataaccagtcagaagcctcatccttggggaagatggcgtctcctctctcagtagttaattgcctgtagtcctttgtctaggggtagtgatccatgagacctccccttccatgttagcatgtctgttggtgctgtcattgtttaaatcttgtttagacagtgatacttttgaggtaccatgggcatagcttccctgtaatgcctaggaaacacagtctcacagcacatgtcctgctcctctggctcttagaatctttctacttccacccccactcatgtgatgctccctaacctcatgtgcaggaacttgttgaagatatatatatatatatatatatatatatatatatatatatatatatatatatatatattggggccttactgcttattttaaagttgtcttgatggttatttaaaagcaaatataaattgaattgtatgatcttattttgagtaattaatttttaatatatttcattgattctaaaatcatgaatctgaaaccatatttaagaaaatatttcatatatctatgttaaaaataagtttggcatttatagaggtaaactcgtagcttatatatgctgagaatttctgcacctccaggtaccccatcaccgtcactagatgctgaaggcaatgtggtggaggattagatggtgtcttccttacaggtctatgctgttgttcctgtggggctggagagagaactcacagaatgaaccactgtgcaccctcacactcaaagtctgggtcctgtcctttgcctagaaagagtgaatttggtctctaatgccctttcacatcaaaatttatgctatcattttctgaatttttcattatcatcttcattggtataagcctaggcctcaattcttagtgttgttattgtaagatactatgtgtaagtattttgtaaactgttgagaattgtttaactggaaggtagttgttgctcagaaacagaaaatggtctatgtgtacagaaagtacaaaaccatatagacttgtacaagtgaacagactgtaagaaagtagctagtctgggctggaaagacggctcaatgtttaggagccacctaaacactgttagagttaataattctagtttcaggggatgatgccctcttctggtctgtgttggcactgcatgtatataatgcacagaaacacttgtgagaaaaaatatccatatgagtaaaataaaattaaattaatctttttaaaatagctaagcagaagtcctattagctttcctctcaaaagtcagagattttttttctgatataagtggtcaatctatcgtctgtctacttcactgagtctttgtggaaaccatagtttgaattgctgtggtttaaggcttgtgataggcacagaaaagtcactccattaaatagaggcactccgtgtcgtttatgaaatcaatgtactctgtctagacaccttcttttggaaagagtgaggccaaataactaagattcccaattaactttttttggtaaatattttccataaagggaatggatgacttctgtcagataacatctgtctaagtctgagatgggactctgaagtcctaagtcagcagtctgagtcagagtgtgaaagttggaacaaggcaagtgacagagcaaattctggcacactcatcgtcttccataattattttgttgtttacttttattttaaatgcctcaatccataagtaagccttttaagattatgatgcaaccagatatattcaaaactcaaaagaaaggaaaaattaaatcattgttcatgactattgtgtttcactaggaatgtgtacatgtttttagttttgggttttttctctttcctccaagtcttgcttcctttaaacccttatggaattatctctgaatgaagccattgcatgagttttgggtggtgttgtttggttggttgggcttggggggattgttttgtttgtcttgttttgtttttaaagagatgaatgctgatcaaaaccaatcatgatagaaatgtcttctcttcttaagggttaatgaggtcatttggggtatttggggggtgggtgttgttattttttgaatcttgcagattttaatcctgaaggctaactgtagctgtttctaaccatggcttttaaataaaactctttcttagttatatgcatttaaaactcagcaaatttgggagctaagcatcaactttccctcatatgcttacttccacattcatgtatttatggaacctccaaagacagattacttcctgaagactcatatctgaacagataaaagcctcaccttgctctgcatatccttgctttggaatatatatatatattacttacatgaaataaaagcttaataaatagttgctaaattttacttttgatccacacagaacaaatagatatcaaattttggatggtgtatattggatgctggtatgcagggcagacggtggtttcaggtacctccctcaccaagacttttagggtgagatcctctgccctagctggacctccagtgcagctgagtgagaacttcaccaagtaactgctggtgttttaggactttcctcatgttcaagattctcatgatggctagctaaaaacagagttcacctggcacatttgccttgggttttctgtggtgtttgccctgttctgttggattatttatttgttgtaccaattttgaagttacttaaggctataaacacatcttgggattttttgtatcttctttagaattcatagaaaggacttacatgaagtaaaagcttaataaatagttgctaaattttacttttgatccacacagaacaaattattgaaaattataccataaaatagattatgaagaaaggagtggcttattattcccataggagcaaactattgagtgtttctctttcttatggaagattaaattttagctataactagtggtatacaatccaataaagtgtatagcaactaaaatattctatgataactttaattaatattgtggatctgaaaaagtgtttggcattacatcatttacagtgtctgtgtaggtatgacaatacatgcacaaaatgtaaatatgtaaattagattatacagctaacagaaatgcagagatagtcacatgtatcaactcaaattgacagtacattctcttccccctcaaaattgtaaaggactggtgaatgaattttataatctaatcctttaaaatgtttccattgaatgtcaaacatacttttattcttaaagagaaatagcagtcgggagacaaaaacaatccaatgtcgtttaagtatgtccagatcttcttgtaggcatgcgcactgtttgggtttagaggcaattatggttttgcttcttcgaatgaagagagctgatttgaaaatttctgcatttaccatctatttacccaacataaacccatgcagtacaagtagattttacacaaaagcaaaatgttcttattacattctacttaatatctagttgtgagaatacttcacatatcattggagacccatgaaaagtatcatcgccacattggaacaggcttataaagggaatgtttgacaaatgctgtgcactggtttattatgtgtcattatgtgaaatttacttaaattaataaaggcggcacaaattcatcactggtaagagatgtgtagctctgattgagtagtgcagaaatctgtgatgtggccaggtatagcgagcacttacactgctaaactcaacctaggggaaaaagcattgatttttgtacttggaatgtccttgctctctccaggcagcttttatctggactaaatggaattatagtgcacctaatgcaacatgggtttttcaaatgctctgatgaattcaattcatcatcaagataaaatacaaacaacttacccagaagatgagtctagaaatcatgcttttgtactcttctctccacttgtactcttgcatgaccttctgatttcatggttctctttgtggccccgcaatacttattaaccttcaggaacactgataaaaggaggctgacctctgatgtccttctggccctcaagtaatcacaacaaccgaaaccagagattgtcctcaggtcctcactagttgaatgcattggcttatctactttcacaaatatttcttaaattttgcatcaagcatctgaaccagtggctttaggaatgtttactggaaacacttcctcaatttgccttttattaaatgatacttattattttcatttttaaaggcaaattcttattttttcttcattagggagtcagccaccatgcatttttggcagccgtgtgttatttcattaccttctttgatgatcctatcttggagctcccactctgttcctatggattcatcacaacttattaggaagaaggtttttctgaacaagacattatattcacccagaacaaaggccacagattataagaatataatgcattttttagttgtgcaagactgagggaatattatcatctatgtgcaaccactataagatttattaaagattgtacttaaagagaagcaaaactatttagaaaagaagtcagatacagaagaaatggtaagtttactcagatttgtagagacatttaatcattgatcaattattataaacaaatggatttttcatggtttttaaactaaagtgctaaacaaaatatgtacatatgtttgacaagaaactatactttggagttctaaaaaaatgtaagtaaaattataacttctggagtgacagtagcaaaacaaataaataaataaaacttagaattttagaaatattgagtaaaatattatcaaagaagggaacaaaggaaatggagaagagaagtaaggggttagaattcaccccagtgcagtagtaatcaggacagagccacttgggaacaaaggcttcactattgctacatttcctcagtcactcttattaacaatacgtgagaaaggtacaaatataatttctttatttgtgtcaagatgcatcagagtgttttttcctttcaaattgaatctttactcttagttctttctgtttttgttttgttgggttgggctttggatgcttgagaattgctttgtcattcatgatcttttctccattcctatgtggactgtatggtactgtaattcctatcatcaggtgtgtgtgtgtgtgtgtgtgtgtgtgtctgtgtgtgtgtgtgtgtgtagttgggtttctgtgggctggtacatttcactgaggccaataaggtaatgtgttgcagaggtttctcttgtcccgccaggtcctgctgctgcttcagccccaaaataaacccgtggacactgtattaattattaaattgttggccaatggctagggcttcttattggctagctctctctttattattaacccataactactaatctatgtatttctaaatggccttatcttatcggagactggcacatcctgtcttccctgtctctatatggcatcctcctctaggcacgtctctgtgcctacctttcccagaattctccttatgtgaataggtgcattatgtgaattaggtgaaactatcccccagtctaagcatgtgtatttattttttccttttttatttaaattagaaacaagatgcatttacatgtcaatcccagttccctctccctcccctccttccctgccggatcccctatcccctttctgctacctagggagggtgaggccttgcatgggggatcttcaaagtctgtcgtatcatttggagctgggcctaggccctcccccatgtgtctaggctgagagagtatccctctatatggaatggattcccaaagtccattcgtgtactagggataaatactgatctactgccagaggccacatagattaaccagacctccaacctgacatcctgcatatgtattcaaaaactgaagattttatgatctttagggtaaaatagtccctcactctgagttagtaagtggtttctgagaaatctatgagagggtgctcctgaatactagtacattgtggccttaatttaaacatgcctgcttttcagagatagaccattaatgtcctgcgtgggggtgtagtaaaggcggtgggtgtgaggagatgctcaaatgcagatggctggagtttgggaagcccaggtgagataggtcgctaggaggactgagctagagagcgtttcaccactgaggatatgagccgtcactgacttttcagttttactaatgagaatcagatggacccacattgccattctgtttgtcttagttccctttctattggtgtacagccactgcgactaaggcaacctatagaacctagagagttgaatgggtcttacagtcccaaatggttagagtccatgaccatagtaccagggagtgttgcagcaggcaggcatggcactggaacaatagctaaaagcttgcatacttatctgcagtaggaggcagagagagagagagagagagagagagagagagagagagagagagagagagagagagagagagagagagagaggagagctagagctacctggaatggcatgagctttggaaacctcaaagcccatccttaatggcacacctcatctaacaagagcatacctcctaatgcttttcaaacagttccatcaactaaggaccaagcattcaaataaaattattctaatgggccattcccattgagactactgcactgtctaatttcatgcttttggagaccaagatttccatcttctgacttggttggcttgagaatctagttagaactgaggaagaaaatatgcagattgttggtatccaagtccttttctatcattatctctcatgatccacttcctcaggtttccataattctatacctctcctggcttcttgatggttatcttcttcacacatttagacttcagctattgagaataaagagcaatcactttccacctatctgttacatagcttccaaaagtttgtttcttgtgtcttcatggaaatactaaggagacagaaaaaacacaatccccaatccccatttcttcctgtttcatcaatgctcctgttcttctgttacatcattttgggtagccgcatggcccagtcgtgtgtgtgtgtgtgtgtgtgtgtgtgtgtgtgtgtgtgtgtgtgtgtgtgtatacatgcatacatacatacatacatacatacatacatacatacatacataatttccaccaactctttctttgattttctttggcagttgttgagtaactatggccttcgccgggttaggaagacgaaatagacaaaccagagtaaagctgtagacttgcttgatttattgtaccttggaatccagttctcttagacttcatatcatcacacaatcttgactggtttctgtggcactgagcccatgtttccatgagtcatattataaatttcataaggacaaagagatcttggcagattaagcatgcttgtattattactgggcgttatcatccctactgtctgctaaagctgtgatttggtgttgcaaaagaatacagaaaagtaccaaaccacactctgtttttactaacttcattgtaccctgcagcaatattctaataaaatgaataaaatgtgatgttctttaccaccccatgtgacctgaaatggtcttcatgggtgaatttctgtttgcaagaccacaataacaagtgtgaatgtctagttttgtaaggtttgtgatttggaaagtatgaggtcccattgcttttagactggatttgtatcccaatatgtgtctgcatgtattgtaagtgaacacctaagccaccatggaaacccaaagggcattatttgtatttacagggaaaagttctgttcaggaaagcagcccttccttagctttgaatgtccttttacattgctgtggctgcagctacctcaactctcattacctaggtgatcttcatgcagtattgtgggagtgtctagagcctttataaatatgaagaaagtgtatagtatcgttacaagttgagaccagtaggtcccccatgttttgtaaattatatttcatagagagatgatcgccaagatttgggggaatgggatgcagaaagaaataattatagtattaagtatttggtccaatcctctacactccacacacacacacacacacacacacacacacacacacacacacacacacacacacactaacagcatgccatgtattgtttccctgataacttgaatacatcaaatttttcattgtggcagttagagcatgagatctacatatcccttgtccttatgctgcaggattgggataataagctgtagtatgatctgctcttggaaccaggtaaataatttaatacttgaagtatactgaaagattaggtatagttagtgtttcacccaatgccatacttagagtcaatgtttattattttgataaaaagagcagagttgatccagtcctgtatagtaggacttttctatgattcttagtgtactgtctgtatcctgccatgtgataagtgttagttatgtgttggttttgagcatgtgagatatggctggtgtaaatgaggaactgaaattttcttcttgtttaatctaaatgcctaattaaaatatgctgttattttacaacagaattaaattagtttatgcaaatgatacaatttgtaaaatgaaaattgcttttagcatgactgtgactcaggtcagactctttttcatttattcacttatctatactagaaatattaaatattcatatgcattatactacatccatattaccatactagatattattgggagtatattctgctgacaaattcagctctgagaaaaatgacaacattttcaaagtaacaatatataagtgaatttgactcatttaggatggtatgcaaatgatgcttatgctgctgtagaacagcacagagggaaaacagtgtcccaataggtaattaggaatagtacttaaacccagtaagaagacccaaatcatgaacctaaatattaaatgcatatatatagtcatagtaaagaaatgatacaattagaaattactagaacagagagtttgaaaactgcagttgaagccaggtagagccagcttgagttgcttcaagtgcagcagagtaaaagggtacattcctagatgtttagccaagacacaagtgctgttcttcaaagcagctgattgacagagacccttagatgaaatctacgcagcaagtacatgggtgtgcactggtagaatgagtctggcttcaacctgtgtcccctactaaacatgcacctggctgaacaggaacaagagaggagtgtgtttggaatttgaacagtgattctaatatgtaggtgattctgaaatgctgcaggttgagagtctagttggctttgtatttacagtttccaccaaggaccttccttgtcaaaactcatctcctactaaaaagctataatgatttttttcttgaatcctaagaaaattttggaatacaccaaagaaaagggagcattttatcatttacttttattctttgtgattttttaaactcgaagggagagatggagggtagccaggtggtcctgatgcagaggaagtgaaatggaacagtcatggcaatgctgccatggagtcactttgttttgttggcttgtatcaacctcttaatcaatgattgcaaattcattgttcaaagaatctaaatgtttagtttttaataaaagggattactttttacagtgggccataaatacagataaaagaatcaattaactttttgctctgcacagtgggacacatatatggcagaccaggagctgataagttgcattagtttgtggtgtaaaagaaaaacaatttttttttcaaacactgtattgctacatagttgtgtctggcctggaactcactatgtagaccaggctggccttgaactcacagagagatttttctgtctctgcctctgcctcctatgtgctggcataaaaggtgtataccaccatgctagcagttaatttttttaagaggaagattagaatacatcctgtttgtaagaatcttaagaaaagtgattcttcagagttctttctcatgtcttttgttgatgtgatgtttttgacaactgaagatacacaagaaaaaaaatacttttctgtttacaatcattccctcttcctagatgccattgcctcctgggatcccatagacaatacctcaggccctgcagcaagacagctttcctttggggaagagtagacggtgcctcagggctttgctgtctctgctctttttgttcatctggtttgtcaagggagagatcagagctggaccatgtgtgtgttagacaagaatctgcctgaacctcgtcccagctccctgatgcttatcctgtctgcagtgaaacaactgctggcaaccttggcaaaaatagttgtgatgattatttgtgtattagctttgccttcctgtatcacatagtttctttttttctccttttccctacatttagctttatccagctttgctttgtctcccttcctcatcttactcctttaattttattcatttatttccttaagattcctatataatctatagatactgtcagttcacatgcctaaagaaatctcagctataccttgataagggagacttgtgttggaccagaggattgcatttcctgtcagtagtatactaaagattttcttttgtataaaactttgatttttatagaaaagcactatttgcttaaaattagcctgaagttttcataggattatgtgtttttgtatcagggacactcaaaattgggcttgttgaatccttactggcccagaatgattttacttaggaaaagctcctatagtgtcattgacattaaaatttacatcttgcttagtattactttattacttttactttttagataccctggattgaaccaagggcctagcatgacaggcagtcattctgccagaaatgcattcccattgcttaggttattgagtcaggatttcgaaatactgtctactgccccagaacttctgagactcatgtacctcctacttctgcatcactagtgttgggattatgggtaggccaccacacccagtcagtactccaaattctaatccaatttgtgcaggattaaatttttgcacattagatctgtcatgtgttctttcagtatacactaaccgaacctctgtgtttcaggcactaccatagaatttgctagtgtgtcaataaatactttgaaatcacactgtaacttttggttcaggccaaactataaattggccccatttcagggaagttcagttaatgaatgatgaaaagtctcgttagaagttaagtcttcaaagagtgctaacatcgtgtctggtatagcactagccaggagctgagtctgccagcacttgtctaagcatttgctccagggtggaaggaaagcaaaagttactgtgtctttggtaataccatttagtaagagttatgatggaaataagtccaaatcctgtctaaaatccagactccattttccttggtaggtgttcccagagttcccttagttcctgctgctctcttcctgctgccctcttctttgttgtttccctgtgtcacaattttaactcttctctctcttctcttttgtacatttggatatattttctttatgtatgctccaattgttggtttttcaagacagggtttctctgtgtagctttggagcctatcctggaactcactctgtagaccaagctggcctccaactcacagagacccgcctgtctctgcctcctgagtgcgccaccaacaccctgccaaactttttaaatcatttggtggtattttctttattaaatcttattaaccaaaatcttgtattccccatgcgtgttgcccactgtgaataggctggatttcatcctgtcttgctaaaactcacagcagtttcccatcacttacaaatacctatcattgtcttaattcatacaagcatgggaggaaaaacagtcagaaggttagacacacttactctagactctggagcaagggttgtccaatgatctctaccatgtccatcctcctcataaaataagaataagaagaataaaagtaatgaacacattttagttacttaacctgttagagcaaggacttgctttcactatgagtcaacttggataaagcagagattgattccaaagcatccagcattaagttttattttttaatacgagagagggggggagggaggaaggaaaggagggagggagggagggaagaagggagggagggagtgagcgagagaggtctccctgccatgtttctaaaaacaattttcagttgcgtttcctttgggattaagatctatcctaggaaccaattcaaaaaatttagatttgtaacagactcttggactctttatgtgtgcatctatttttgtttgagaatttcatacacatgcagggtgttttgacgaaatccatcccatccaattcattcctatctcccatatcacttttccctcccaacttcaagggctcttttttaaatccactgagtccgcttactgctgcctgtatgtgcataggtataggaccatctaccagagcatgagccatcttcaaggggccatatacctaaagaaagatggatttccctttcctagcagcaatcaattgccacagctgctcagtgaggagtgggacttcatgtgccaccctgccctatccattctcttaattccattaggcagagctatactttagttgttcttctccattatgtgaactcagttctcctccttttctgttttaatttaatttttaattatatgtacagggaactgggaggggcactatgcaatctgcatgctggtacatgtagagaagagacacattggatgctctggaactggagttacaggcagttgtgagatgcctgacatggttctggaatcgaactcagatcctctgcaagagcagtatactctcttaattactgagaatctctcagtcctacagtgttccttttcaaatggcataaggattgactcttggagccagcctgcctgccttccttcctttcatccttccttttccttccttcctttctttctctttattttttgttatataactcttatttgtttgttcatttgttcttttacatttcataaataatttagccttcaggaatttgtgtcaataggaaatatgaaaaaaatttctcttaagatttttagagagtcactaaaaatattaggtgaataaaaatggcttgtacaaattacttttttaaatttatcagcttttatgtatgtttgtataaaacagaatgaagtttctcttagtttatattataaaacacataaaaataaataccaaattgaagctctgagacaatgtcataaaaatcaacacatccaagccatttgaattttcaaagcacttctaaaacacaaatcttttagatcagttttcaactaaatattattatctccactttataaccattgtgtgaacatacaaggacaatgtcaatttcgttaataaatgatccatcaaattcctgcatagtataaaaatgttgatacatttattcattcattattatgtaaaaatctgtctgtaataaaaggacttttatgcatagggaaatggatttatgcacagtgaatttataatggtttcccagatgttcatatttaactagcaaccattcatgaaaggactgaggctttcagaggttatattcctgattaatagcttttgccattgctagctgggtgattttatagtcagtcagagaattaaccatgttacttccagatcacaaccatcaatataaacaatgtaatttcacatatttcaataatattttgaaatgaaaacaagacattactttatctcctttaatgattaatgtagtatcacagatctattggctcctcttaaatattgctggaaatgaaccatatgttaaaaatatgttatatttttaatataaacatatggccaccatcttagataaagcaagagtactcttaaggaaggacatcatgtgttgtgatgattttttgtaatattattgagtttgctattgtgtcaaattttgttttttgatagtaccatctcttagaaaccatccaccacagtagcagggagggaaatattaactcagaaaaacaccagctttttaggcagagtaaaaattacagggattccttaatagacgcaaaaaaatgaaatattgctgtgaatgcatgtgcctatatcagcttaagtagcttattataatcagattaaaaccttactcagataaatccattatggtttatgacttaaatccatgagaattgtaacagagctttgtctaatcaaactcaaatttaattatatgttcacattataatctagagaaccgaggtttgggcttaacatgagattcatttctttgtcctgaatggaaaataagaatcttttttctcagttgtaacatgcttgccaatacaaatgggtaatcctatatgcctctaatagtctacatttaggaagatcttaattcagccatctttagccttctgtagttcttagggcccttctaacaagatgcttcaggtttggtggtttaaatagaagaaatattctgacattttctgacctcaatatccaagatcaagcttggtgcaaaagtttccctttttgacacctttctcttaagctgtggaagccaccttagctctgtattcatatggtctttctgcatgtgtgcacattagcatctcaaagttccctttcttgtaaggatcccattcagattggcttaacagaacaacataatttcacaatgatcacctctttaaagacgttatctccaaacactgtcacatctgaagttctgaggataaggacttcagcatttgaatttgagagggacataattcagcctataacactattcatgcgttaccttcactattgttttctcattctaaacatttattttatgtctactagtatgacagataatgggctagaggctgaaaagcaatgattaatgaagaaaatgtagcccattcctgaagagatctggaggaaaaaggaaacaagtaattaattgcattttaatgtagtgttttgatcaggatgcacaaaagatgctttgaaagagcagagccattgaaaccagccttggggaagtaaggaaaagctttgtcatagaaatgaccttatgcaggttcctccattgtcagtccagagtcagtgagctcccactatctcaggtcatcctgtttctgtgggtatccccaaactggtcttgactcttttgctcataatatctctctcccctctcttaaactggactctgggagctcggcccagtgcttatctgtgtatctctacatctgtttacatcagttgctggatgatggttctatgatgataattcagatagtcatcaatctgattccaggggaagggcagttcaggtaccctctccactaatgcttagggtcttagctgaggtcatcctatggattcctgagaatgtctttagagccaggtttcttaatagcccataatgatttccttaatcaaggtatctgttaccttgctctctctttttctgaccttcccccatcttgaccatcctgttccctcacgttctccccctcttcccttctcccctccttctccccttccattttcccttcttccctcttccccatgctcccaattttctgaggtgatcttgtctatttctacttcctaggcagctcaatgtatgtctctcttacggttctccttgttacctagtttctctggggtcatggactataggctggttatctcttgctttacatctgatatccacttatgagtgagtacatactgtacacaccatgtttgtctatctgggtctgcgttacctcacttaagatggatttttctagttccatccatttgcctgcaaatttcatgagtagtactccattgtgctgagtagtactccattgtgtaatataccacattttctttatccattcttttgttgaggggcatctagattgtttctaggttctgtctattatgaacaatgctgctatgaacacagttgatctaatgtctttgtggtatgacagtgaatcctccatgtatatgccatagagtagtattgctgatcaaactaggccctttgaatatgggtgacagttgtgtggctgtctgtggggccactggcagtgggaccaggatttatccctagtgcttaaactggctttttggagcccattctctttggagggataccttgctcagcctagatatagaggggaggaccttagtcctgcctcaaagaaatgtgtcagacttcctggactccccccgggaaggcttatcctctctgaggagtgactagggggtggtgtggggagaaggtgggtagggcaggaggaggggagggagaggaaactgggattggtatataaaatgagaaaggattgtttaaaaaaattttttaaatgattaaaagggaaacaacataatgaccagaaagatcaatagccttcactagaggggaaaacagctagatgagtctacagagaaggaacagataagaatcaatttaagtctgtgcaatctcaccctcccaagtctggcagaattctagagaaggttgtaagaaatggagggatactgagttgtaaattaaagctatgggaaagtaaacacacataagatgaaattttgcttagaaaatgagtcatgttaacagagaaatgaagcttggggaaaattaattaatagtatacagagcttgtttttttaatatatagggtattctacaaaccaataaaatctcagtaatccagaaagaagattagcaatttaacagatttgaaataaaagaaaaatgcctatttttaaaagataacaaaacgtaagtgttggcaaaagcatagagaaattgaagccctgtgcactgttgatcagaatgtaatatggtaaaaaaaaaaaaaaagtactatgaaaatgaatgtagaggttcctccaaaaaataaaagtgggattaccctgtgatccagtgtcatggccaggggagatgtatgtacactgagattaggatttcaataaggatatctgtactcttgggttcattgcaaagttatttaccacagccaaggtatggaaacaatctaagtgtccatcagtggaatggataaagaaaacatgacatgtatgtatgcagaatgtaatttagtatttcatatttagattgtaaagtgggggctatgtcttttttttcactgtgtggatgaacctggaaagcataatactgagtgaaataagccagaaatggaaaaaatactgcattcactctgaggaatatgcttttaaaaagatttgacacacctatatgtgaaatatattttaaaagcctttaaatgcacagaaattgagaaaggaatttcaatgatcatgagtaggctataagaagaaatagacagatatggtttaaagggacaaaattgtggacatctacaatgaacaagattcatctaaacacaaagatgaaaattaacttgcatttgggctgagcatgctaaagaatacctgtaatcccagaacctaagtagctgaggcaggggaattataagctttaagatagctagatgagtgtggtaagaccctatcaaagaacaaaaattatattttttctgtatttttcttaagtaattatattttaggtgctttgtctcacataaagagtaaccatatattaacctgcttcactataataatttcataattttcgtgtatcccataacactatattttacatctcacatatgctcaggaaaatctattcagaacaaaggcaaaaatttagtataagacaaaaaatgaaaatcaagtggttcataagcatgtaaaaaaaacaaactgtacacatagatgcaaaacaagatatattttcacttctgctattaaaattttaacatttgttaataatgtatcataagatgaagaaaaacaggccctactttacattggtggtaaatatgtctgttgttagtaatcttgacagaaacttggcattatgattcaaaataataaatgcacaatcttagtaataattttctaggaagtagccacacacatattaaatagtgttgataagggtttttcatttcagcatgaaataagaaatgatatttattaagtatttcagaagaggtataatgatatccaaatttattctgtattgagaaaggatgggagtagaaaaatatggtaaattttaaaatatttatagaagctacctaatgtatgagtgttcagtgtaaaattattttactttaatatacattttaaaatatgttaatataagaggcaaatcctgctgataattaaatcttagcataaggaaatggctttcttaatgatggcacatcttatcatagaacactatagctgtttcaaacaaaaatgagagaaattcatacatatagatagggttctacaatacatattgcaaagtgaataagcctgtccctactgctattatcttaaaatagcatctaacaaagcatgctaaaatcagggaaaatatagtcatgaactagaactttgtctagaggatggaatgtgaaaatcactatttttacattttaaaatttttaataatgtgcatttatttatttaatatttattcaaaatagagtttaaatatatactgggtatagtatcattttactttacatctatattgctgcctgattgcaggccaggtgtttttattgctgtgtgaaagcaagcaaattgaaaaggtcccatgaaatttagtaatttttttcaaggccatgtaactagtgaagcaaaaggcacaaacaggatagagatctctctaattccaaagcctttgcaatgccaacagcaatagaagcactgtgtcctagggaaaaaaaaaaacaaaaaaaaaacaaaaaaaaaaccagcatgatccaaagccacagaggagacgggaaacacgctttgggcagctgtgcacaacttcctgtctgggttgcaagatgcattgtggagaggcaaagggaggatggaaatggaaactgtggtccagacttgaggaaacttaatggccacattaagagggtgttgcctcaacagatacttaggagtcagggctaatggtagtaaatattttcaaattacttattggttaaaagctttgaagaatttagagaaataaaaaactagtgtttggagaacccatgttgctttctgagcataagtgaggtaatggatggaaaatgtttttatttattttttttatttatttacttatttatttatttttatagttgtaaagctgttggcctttggctaaggtttcttaatcttaatcattaacccatttctataaatctaagtatctccacatggtcttatcctaccagagaaaggtccagggacctcttactcctctggcatcctacatcttgacagttcagtgtctctgcagagaaaagaagagagcaattcctgtttgtccttgcttaaatactgattctgtcccgctacatcacttcctgcctgtctgtacagacctctagacctctgtggttaggtagtggcaggttctgcccagctacctcacttcctgggatcacatgataactcctctctgcctacacttcccagaatcctcctcatatcctatccccacctgtcttgctgccctattagtcaacagtgttttatttatcaaccaataagataaacatatgtacagaggacatttctcatcatctcctcttttctgtctaaataaaaaaacaaaggttttaactttaacatagtaaaatatataacaaaacagttattaagcaggaattataatcacgattttaatctgttaacattcctaaaattgacaggaaatattctatctatcctatctttgtgagtgtaaagtcttacatgtaacttatttattatcataactaatgaaaccatagctatcttcaactccaccaaagaccatagaagaatagtatacaaactctaaaactgacagagacatctcactcactacctgggcagtcactcagaagttcctctgtaacataggagcacccatcttcagcccctaggacatagtgtgtctggcagacttctcagtgaagcagggaattttaaactgtctgcctgtgttggcagtttgtcagtcaatttcctctgtgtcctgcagcatgtctggcagactcttccatgaaccaggaaccctttaggactatccatcttttttgcaagttcagcagtcactttcctgtgggtcctgtatgtccagtctgtcaaacagtccaggcaagagtggtttcttgcccaaatggctagtctcgccatattgaaagcaaactccataacaagtttcttcaatgcccatatttctctcagacataattggtgtgccaggagcagttatatctcactgtaataaaaacctaaatcattttaaatgtcatattctgtaggtctttgaaaggtttgaagactacctttccacctcaaatatatttctgtatatctggaaaaactaactaacatagctgtaagttttgacttataggtaactatctataatctgtacttaatcataaactacatttttaaatgagttatataagcacagtacctaactaagaggagaaatatatatatataacaaaattgacctttgtatcaataaatgaaaatccattccaatacaaagttttcatttctatatcataattccctttttttctttagaagcatattgactgtgatcattaaccatttgtaatcaaccacatataaatgaaaacaaacatttataaacaatattttggaatgtggacattgttctctccaaactgcttcatgctgtttggggctgctgtcttgggatcctaagaagacccagaaatcctgactcactgtagtggtctgtgactgcatcatctcagctgctttcgggtgttgaatcacctgggccactgcttcaggggttcttgcgtgatcagaccatattagtctggaaggaatctatagcttttcattttctgtggaaacaggaataaaatctcttttccaaagtaacatatccttatatggagaaaggttctgggacctagcgtcctacatctcgactgttcagtgtctccacagagaagagaagaggcaaatgttttttaaaaacacacagtatgtttcattataaattgtcatgttaacttttttttttggtttttcgagacagagtttctctgtgtaattttggagcctatcctggtactcgctctgtagaccaggctggcctcgaactcacagagattctcctgcctctgcctcccaagagctgggattaatgttgtgcgctaccaacacccagctccatattaacactttataggcacctatgaagacacttcttatgtataaatgaaatctcacaaatagaaatatccacaaataacatactatgtaaagaattttgaccaataacacttgttcctggtgtaagaagatacaaaaagactacagcccacaatttcctctgaatcttgacctttcaaaaagaaagtgataataactaataaaagaagtcaagactaatgacaaattttacataccagaattttccatcttattataatattctgcatacttttagtggatttttccatgaattttatttttttacctttgattgcaatttttatctaacaagtaatattgtgcatattcatagagtgtccttagtgtttcagtgcatactatataatttacttacatttattttacataactttactggtttgcatctattgatgcaaacttttttgtgtacttttcatagaaattaaaccctggaaattctctaaatagccatattattaatatgttatataaactaactatataattatatcatggaaaattgtgtatatacatgaaaatataatttcaaagacttttaataggaactttaaggagtaactggagttagagctgcaacatgcccatcagtttgtcaagtggcagttcctttcaggatgctatgtccttagagctcccaaatccccaggcttcattaccctcagctgaccagaaaccttcatacacagtgtcacttctttcttcaagcactgtcttcatttggcttctatgacactatccctcttctatccttctttttccttaactggttttctccaggaagtctgaaatgccccagcactgcaatcagtattgtcccttcctgtcctgacccattttcgggaccttccaaatgtgctcttcagcttgggtctctccgctgacctcaaccctattcaagaccctctcttgcttatccaataaacacttgtaatagattgtcctggataaagatcaggctctttccttcacaaatgtattctttccacagaatcctctatctcagaaaatgacaacccaaactctgattgctcaggtccaaaaatttggcatttcctatctttgttcttttataccccacatcttggttgctctggaatgagggagctgctgtcattatgtgtgacttgtgacttagtaagaggtggttatcatgggaagtgagggcctaactatctcagtgcagatgcagatacagatggcagcaaacctgcctggtcccaaaggtggatgataatgctccattgtaaccctgttttaaaataggtagatgtccccatctgaattatgtttcccataggttacagtcacaacctctgctattcatttgtaaaagtggcataataattacttgtacattatgtagtccatttatgtgggttaggtttaaaaaattaatgagtgttaacaatgtgatcatcctataatacacctttaatagtaacttgcttatctgtcttcttttatatttcaggcaatataaaaaacactagttataatagaaattgttatgcactaatcattattgtagggcactttggtaatataaaaagtttggcagaagctatactctgaaaaggattatgatgtaaaccagtgggttttccacttcatactactaaataatttctttctagtttatataattgaaaaaaagaattttaaaaatccttttcttatatttgaaaaattgatattttagtggctaatcataactttttggactttttttcatagatgtttctatacaatccttcctccattttattatatcctttgtagaaaatagatcatatataataactcttcaaatctgtccctaatttcttatgtaaaccataatcatttcaaattaaactattcttagagattagtttaaccattttttaatttaaatggtaatgaagtgttttatgtgattcactcttagtttagtactgagcctagaactgtccttttattctctttcttctttgtatctcctttttataactttaattctaccattcattttaatgttcaatgaattctttcccaaaaatctgcccacaccagctaccataaatggaattgggagtgcactgaagaacagtacacacactgtccaattcctaatggaaataacggggaataatggcctgtctgcattattgtcaaaacaaacttgctataaaatcataatcatgaaaatagaaaaaaatgatgagtctatcaagggactctttagtatcataacacatatcttcagattttcaccttgcattctgtatcacttcactgtgagcttaatggtagccactgagggattctgttcagaaatgcacaaggaagatcttgggcaatattagaaggggtttaagaattggaaataaataggtagtacttaaataaaggtgaatttttgctgaagaaatgtggcaattctaaaactgttgcatccagagatgtttaaagacatgaatggtacttttgaaaatggtagagtaacaacaaattgtcagctgcacctaagcgttacgcttacattggaagtggatgatatcaacatggccagtgctaatgtttctttaaatttctatgttgttttcctctatataaacaatttcaaaccaccgtagatggggtagaatatcatgaaagtaagaggaattgtagaaaacagggttccactaaagacaagaacatggtgtgctggcaaacctttgtcaacttgacaagagcaaaagtcatttggagagaaagactccattgagaaagggcctccataggattggcctgtagccaagtctgtgagatattgtctagattagtgatggatataggagagtccagcttacaagctcacaagtctgtgaggtattgtcttgattagtgatagatataggagagtccagctcacaagggccatctctattccttgacatgaaaaaacaaaaaacaggctaaacaatccatgaggagtaagccagtaagtagcactgctccatggtctctgcatcagctcttgccttgagttcctgccctgacttccctggataatgtactataagctgtaatacgaaataaaactttttctcctcaagtgacttttgatcatgtgtttttttcatagcagtagaaaccctaagacatagggtcttttaaattccactgaactgtgtagaattttattttcaagttggaactgatatgtcatatcttgactgttagcgactaaagctactggcatcaactttaccaccattaccaacaataactaactaaacactgatgacaaaacactattaaaaactgctagcatcctatcaaagtctgaataacaatagtgttgaataataacagttacagatacttaagtatgtgtcctgattgtggcaaatacagttttaatggacactatatctcattgtatttttacaacaaatccatgtagtagatagctctcaatatttccattttatatatgaagaaataaaggcatgggacagttaggcaggtttttttttattaagttagagtatgtgagtggtagaattattcagtttcaggccttaatagaaacctggtcataattacagttacagtgcctctcctgaccttttgccttattcaacaacatgtttcaaactattcatcaattggaatttgttattttcatagagtctgatacacacacagctggcaactgaagacaggataagagacttaataataaaaggcttcaaatagtgcttacttatcggatagagagctttcaggattaaaatttagagtttcaaaagacgatgattcattttgcagctgtgactgttaaaccattaactgattaacctctctcactattgactgtttaccatattttaaagttgcagaaatacccagttaatcccacagttatcaattgtagtgacattagatttacatataatcacagctcaaaatcatgcttgtggctgtaataagtggttacattcttttatcagtgggtttagtttcctagcagctgataattttgaactcttgatgtgcactgcgttgaaattaaatattcattatgatcttttgaagtttacattggaaagtacttcaaaaactatcagtatatcaaattataatgtactgcttctcttttaagaaatgtgataataatattccttttcaattttgctccttacaattccttcgttggtacagatgttagcaactaacatggggcagctaagaaatgccttctgataaaatgggaaaactgtcagccataaatcatgagctttgactatggggagaatgcctcataagccatgataattttcagccatgggtgactgtaaaaggataggtataagccttttattaaaattaacctgttttaacactgtcttctggataagtttgtagctcattagactcttttagggatgacatcttatgggattagctgttttgtattttctaattgattatcttaattgctcaaaaatatttttaaaaataatataaaaattaatgtgtgacagtgcctgcatgcatgcacacatgtgtgtgcacacccatgctttgttatgagacaagcaggcctgcagactattcattcaaatttaattgcatttcatattttacctcagagttcttaaacttgactgatggttaacagtaaacacatataattattctttcatgaaacttggccactggcagtaattttcattggcagcaatttaacagctgaggatgtaagtcaagaatgatcatcaaggatgctgaaccttaaaagcatgtggtttgtggtgctgttaactctttctgcatcttttgtgtacaaaaggaaaccaaagtgcagctctcttttgttctgtttggaagtaagtctctctgtagtcctaactggcttagaacttactgggttgggccttgaacttggacaaatccttctgctcagcctgcagaatgctaggatttaaggcatgagctccacatcctgtttttagcacttctcattttcctttttaaaatgtaattaaaatatgagtacatcacctctccctttcttccctcgaacccctcccatacctacccctacatcctctcaattcatagcctgttttctttaattattattgttacacatatatgtgtgagaataaatatatacatacaacctgctgagttcatttagtgttacttgtgtatatgatttcagagatggttgctttgtatcggaaaaccattcaggacttattcctggggaagaataattttccccctctcagaagtcttgttttttactttttttgtgggatactctctcagcctagacatggcagagggcctaggtctagccccaaatgatgtgacagactttgatgatcccccatggaaggcctcaccctccctggggagcagaaggggcttgggatgggggaggtgggatggaaggggggagggaactgggattgatatgtaaaataagattgtttctaatttaaactaaaaaaagaattgtattgctttagaaaagggcattagttcttctccaagatccatgacctcggtagccactggtagctagccatttttgttaacccaagcattttaaaatatagtttccatgtgagtaaatacggatgcaaaaacactgtcagagttcaccagtcactaccccaagtatttaaagtcagctacagcaatcattaagtgtcagagttgcttcaaatgtctcagtgtctcattttacagaattgttctgcttgtagacattgttatttgggaagttttaaaacaacttagcacttatgaagtttctttctggccatggctgttgctgaatttctcatcacagtgttcagaattacagaaaacttgaaatattacacctatctactcttcatctgattgtagcaactgttgccaatatttcagatttgttttatcttttatttgcatctagggcctggaaagagcccctgctactctggcaaaggagccagattctgctgccaccacccaggttcaacaacccagaaccacctgtcagttcagttctagggtgatctgatgcctctggcctcctagacagtcatctgcactcaagtgcacatacccactcacagaaacacaaacatacacataattttaagctagtaaaaacaaatattttaaaataagtaaatttgattcttgtattcatttttgcttttcaattggtcagggtttcttattgttttgttgttagaaatattacctttggaatatgtatagggaggcaggtgttctaggaaaggaattgagggctttatgagcttacaggcaaccccatgtctgttttttgttgttgttgttgtttgtttgtttgtttattttgtttgtctttttttctgagccattggaaaataagttgctatattaccaacatcataaaatctaaccctaagtattttatcatgtatcgcttaacagtaaggaaattctacttagggagtcacaataacatgttttttgtttgttttgtttcccactaacctaactggaacagtttggtgactatgagtttggaactattcattagagcctgttgggctcatcagtgtgttcacaacagaatactaactcctcgctgcttctcagagtctcttagttaccagtaggcaatcagaaactggtgaccctgtgagccctttcccatgcatagctgactgttttgagttcatgattgccacaaacatgtgctgcttgggagatggaattttgcagcttttctccctgtttttctgactcttatcttcaaatgccccttcttcagcaatgtgccctgatgcttaagggagtgctagaaatgtcttatttagggctaagtcctttgtgcagccataggtctctgtaatcatctgcactcactacaaggagaagcttttgcctgtgggtataaacacagatgagaaaaggtgttttgatgctttattagtattaattctcactggggcctaagactacctttgtttcagactgggtttacagtagtgggcatgaatacccacatgtagaataaatctctaatccaatcagtgaacagtgtttaccagtgggctcatcttgcctggctggttggaattatcgttcataagagttcacatttgggtaaaaccattgctgcttttactatcccagcagcctgcataacagcatggagcaatatgtaaactagctagtagggacaaagcttccagttcggttctctatatcctgtctctagagtatgtgacatcttaagatacatgcttaagcagagtctcaccacctactctggtaggcaaacaacaggaaaggtaggaacctgtattgtttgggtggctgctataacctccctgaacacttcttatagaagaatcctacacctggcacaagggttttgtttggtggcttattacttctaggactgggattgtctagttttgtgaagtgttggactttaaactatcttttatgttatgtttttaaattgggttaccagacagtgggtttcctattgatttttatacacccattgttttggtctttccaccccaattttcccttcccaattctcattatctatgcactagcatccttcctatattagagtaacccccacactttactgtctcctttaattgtagtttgaattctggaagcactctaaattaaacacacaaagtgaaagagttgaggctaggatcttcatatcagaaactgccatttgtctttctggaataagattataaatttcttaaggtaaagtagatgcccaggagtaatatggctgagtcatatagtagatctccttccagatttggggggatgtggatctcttgactgatttttaaaatgcctcactattttacagtcccaacagccatatgtaagggttcaccttgcctgatatccatgctatccattttatcagcctctatacataaatgcacattatcttttgagtcttccaaatttttgaaagtagttttcaatgctcatggtatatttctctaaatataccacataatcatagttcagttatcaaaattaggaaatcagcgtaaatctgtttccaaaccttgttctgactttactaattgcctgcatcaatcaataaaaaggtaatgagtatttttattccaggattcttttcacaaacccattttactattcttttatcatgtttaaataattttccttgatctggaatagttcctgtgtttctgtctttctgatctcaatagtatttttctaagtatttggacaattacaatggaagatatcctttaatttggatttctctaaatgttcctcagaagatctgcattttgtactgtttggctatgtatgtaaatgtgctattcttcatatgtttttttttgagagcgagaacattgttgatttgtcccatcgtgctataaattcagtaatgctaactggagataatctttgctactcgtggatgctatgtgtccttttcattttgtccaaatcatatccaaacacattttatgctctttactgagatctgctttttctgtcgtaaatgatctcacaatcactgtcttataaatacactttactgaaagtttcttccagaactttgctttccttggcttgtagaacctttctctaatatattctgagaccaggtgttgttgtgtctcttccttctcacaccttccctttggacaggtgtttcttccttcccagaactcagattggctcaagccatgagtttgttatataagacattttgcatgacgtttcctctttgtcctagtttctctcctgtctattcctagtgtatctctctctctctctctctctctctctctctctctctctctctctctctctctctctctctcaatatatctatttctgtttcattagtttaggccattgctatatttctttgcaagtggatttcccaaatttatttattttattccattttaaaatagcttctttttgttgttgcttgcttagtgaattttgtttgctttatcttagatggcaaggtctagctacagttgtccaggaaagctcaaagtcctgcactgaagcaatcctcttactttgacttcctgaatagcagccactaaagaatgcatgtctatcttctgctccttgttgtctttttaaatccatgggttttattctgtaaatctcctatcttctttactgcatctttttctatatcaccaactttaatgtctgaaaatcaccttcaccaagattttcaacctctatttcaaaataggctaggggaatttgaaccctacttcctaatgactgtcctcagacatgaaaactaacaagttaactctgtgctgttcctctctagaccctgtgcttgctaagaactggctgaggcctcttattgttcttgctgtttttattttgttttgtggcattttcgataactacagattatccaaaacaacttgagcccactttttaaaactactttgcttattttctattttattagatttcatcttttatctcttggcattgctgtcagaatcctggtgattcctactggttcccatggcataattgttcatttttgtcttttttatttttatttttcatctttattatctgtaaagttacattgcattcattagagctttttaaatctagtgagcctattcttattctgcctgtgaccatctccaaagctctctgttctcctaccaaggttcctcaaatttgctgtcatatgaaacactaagttgtagtccccattacacatcacaggtaaatgctttcttgattttcttactttaaaatcttcccccatgaagtcatctgctttacatgagttccttcatgtactttatcctttctctatcaacaacatgaaggaactcatgtaaagcagagcctcaaagttgttgatgttgtgtacagggttttgtgtgttaagtttgaaaggtggcttatagttttatcaaattctgttttatcaagttgtggcataagtgcatattctccaacccagaagccaaccggtacttttttgtgcatttcagtgtctgaagaaatgcatcatcaggtacttgcttgaatattcctttgttatatcattcctgaagtgtgggcccttgctgcgttagtgcagtcgttctcctggaagtcttccttaactgaggatgttttaaaattgccttggactaatgtagtcttttcactctcactattctttaggccactgtcctcttccttttatacatagatcgtttcaactgattttccctcacaagtgtccttctggggcacttctgtctacaagaagctgcataaatgttcttgccagctccccagctctctgttctgtcccctttgccttctgcaacccatatggaaggcgaacagatgagttaaaaatgcttgcctctttccctttctgtctttggcatcccccaccacaacttttttttaagccagcgtcctctatcctgccccagttttacaaagtgctccgcctttcccttcttcagagttctcacttggatctgacacttgacactcatcaaaatcctgaacccagaaaaaacttccgagatcaccccttcttcactcctccctgtgtccccatatatcatagtgctcccatcaccccttcttcactcctccctgtgtccccatatatcatagtgctcccatcaccccttcttcactccttcctgtgtccccatatatcatagtgctcccatcaccccttctccactcctccctgtcatgctatttatctaatgattccccattcctctctgaattaaagatgaagataaaacagacaccattggctatttttcttgtcacctctatgtctgtttacatctttttcagaaagataacctttactttttgcaaccagtaaaacatacagttcttgaagttattgtataaaaactctgtctaaaatctgatgccagtttgccatgtaacattgttccatagaaacagactaggggttggagatggagaagtcattcagtgggtaaagtgtttgctatataagcacgaagatctcagtttgattctcagaaccaacatgtaaagacaagcatggtggagtaagtttgtagcccccagtcctggaagtagtggggtagagataagaggtttttctggcattcactggccacccaacctagcctaatcagtggtctccaggccaatgaaagaccccaaacagcccacttaaaacaaatgggacatgaaactaaactgagttttcaaaaagcaagtggctgataaacatttttaatgatattcaacatttctcaatatcaatgaaatgcaaattaaaactactttgagattttatgttacctcttttgggatagcaaaaacaagtgataatcaaatgactagtgtgtatgtaaggatagaggaaatcttattcattgttggttggagtacaaattggtacagttactctagaaatcaatgtagaagttccttcaaaatctagaaaaaatatacctcatgatccagctacaccagtcttggacatatacccaaaggaccctatatcctactgtagatatctacccatccatgttcattgctgctgtgctgtatcctgcatggttccagtgattgacctgactggggcagttagggaatgaagaacagataaacatgtgcatacacagaaaagctgggataagtgggtcagagaagcctcaacacaccaagggctctgcatgtttatgctatgtgatgaatgggatgttggagttattgcatacaactgaacaaggaggaagggtttgtggtacacagcacaatcaagaagacaggtttggccaatatcagtagggatagtctctgtagggaagcagtcttggccataaacatcaaggggtaggaaaccatagtggacattttctgcacatactatcaaattcacacttggaccaaagaatagccatgccatccttcctaacatcacaggagggagagctctgccaatttctcaagggtctgaggctttgatccctgatacggctgactcatgtcaacaatgtacatctattcatgacttcttcacatactcagggcttcctcaggtccccagcctgctctattcataatagctagaaaattgaaacagcttacacgttcataaactgatgaatgaataatgaaaatgtacatttgagcagtggaatattaatcagctgctaagaaaatagaatttaaaaattcataagtagatggatagaggtggaaacagtccttctgagtgaggtaacccagacccaaaaattcacattgataagttttatctatcttatttgcagatgttagctttaaatcttcaaatgtgtgtgtttgtggtagtttgaataagaatgtcccataagggctcatatatttgaatgctaagtcaccaaggggtggcactatttgagacagattagaagagttaggaggtatggtattgttggggtatgtgtggctttattgaggaagtgtatcactggggattggctttgaacttccaatagcccatgccaagctcagtctttctctgtgtgtctgttaagtgggcatactgttaaaccaactcctaatgacttatcactatacccatagattgttgcatctcccagccctcatcagagaagcttctatttgtagtagatagaaattaacatagagagccccacctgattggtgcaatacataagatactacagaatgctcagctgtaaatgaacaacaataacactctactgcttaccaaaggatcaaggcagaagagggagcaaaaaagattttaagaatattagatagtagacaactacaaggaaactgtcttctggacataacaaatacataacagttgagacagcatacacaagacccacacagacttgaaccaaactaaaccccatcatagagagaggatatggtcataaaggcctgcccttgcctaaggaactactggttattgatgactgctgagaaaggaagggtcaggtttctttaagagtgtgttccctgatggtagaccactcttcagtaaacatcatatacacatgattgtacggacagcccaaactattttaatgagtctaaaaaaaagccagtcaggggtggtgcatgcctttaactcaggtagattggaggccagtctggtcaaagagcaagcaccaggatagccaaggctattcagagaaaccctgtcttgaaaacagtaataataataatgatgatgatgatgatgaaatgataataatattattaaaactaaataggacacaaagttagatatgtagggaagagaggaagatctgagaggagagaaggaaggacagataagatttaaaaaataagagttgctctaatcactgggaattgaatgttgtaaaagcagctataaaaaagaataggattctttctcctttaaaataaatgaattgaaagcaaatctcggcattgaacctgtaatgttgtctgtgtttgttcagaaatacaaaatagtgatatttgaatgatatttattattgtcttgatataaagatatcaaagtaaactgttgggtgcttttcagtaaattttaatttatattgagtttttaatgaaaaggaatcaaaacttaactgtggtctggagaaagaattcatcttttatttgacaagtacagatcaaaattgccccagattcaataaagcaattggatcagcgctgggcaatgtctccagtccagactgaatgctcttctggtacatctctcatttaaaaacagtttccctaccaagttggtctttgaagatgtatcactcatatttagaaacataaattttgagttagcttagacacaatataatgaatatcttataaaattatgtagagctttaaatactttaattaaatgcaaagaaaaaacaatctgttccattacattatagtcttttattaatttgattttctccctgttgagttccttatttatcctagagagcctgtacacatcatgactaaataaaatgcttcactaagtagctacaagaccaaatagtcctcttgtagactgattatctatgaagcaaacaccactaaacctcttctattttcacctttttactggaggtctttgtaattttggcatgcagtttctgaagctaagtgaagcactatgcaaacatctgcagatcctgacccttgctttccccactcttttccaagcctggcccaccccaatgcctgtgctttaacagcttttcctgtgtatctgctctatggatcatgcctggctcttggaattcattttatatctgacagtttaattccagtgtcaaaatcaagtcattgtcatttaaatactccattatttttctgtagtgtaaatgattttcccatgttcagaatcattcagggatttttataacctagtcatgagcagtggcagaaaaatgactacacctggatgggcagtggtgtcacacgcctttattcccagcactcgggaggcagaggcaggtagatctctgtgagtttcagaccagactggtctacaagagttagttccaggacagcctccaaagccacagagaaacccgtctcgaaaccccctcctgcccaaaaaaatgacgatagctctgaacagcttcatatccaccattatctctaaaaagatagctgtgatgtgtgcaatttcaaggtgtggtccttacagtggaaagggaggatgcaggagaaggaagggccagtatggggagaagaggaaaaggaatgtattacccgacaataaactatctgaatacagatgcatacctttgtgacaagatgatagtttgagctgtttaagatggtagaacaagtagcccatttgtataaaaacatatgcaggaagaaaaaaaactttcaaattggaaaaaattaaactgagacaacaatttactgagtgttttaggaatggtccttgagtcatcaatatcgtgttgtagattttcatcaagcaacgactaatgcttgacccacaggctgcccactgttcttatgcgatggggaacaagattatgataagcttaatcccctattaaatatccatttgccacatttattatataaactgccagcatatcacagtatccatcactgatggaaaaacattatgatacatgtaactcctattaagaatccatttattatctattctaactatacaactatcataatggttcagttaaagctggtttacagataaactcatgccagatccagagatgattcatgctggttggataataaaaacaagagcccatcacatggatttaatcactcatagcgaaggaaaagttgactagcacgtcaaccagccagccaaaagttaatgaatgtagataacaattgtccacaagattttttacatataaaatagacccatgtggttccaaacacttctttatttttgaacattcagtagcccacactcagaattttatctgaagtgttacgtggccttctgtaaatagtggaagagaagaaaacctgtgttttcaaattgaatcattctatttccccactgtcaggatccacctacaaatcatcttcttctaataaacagttgagaataatacaaaggaataataatttagtgactcgaaatgcacaaaagtagggaggaaaagtgtatgagaaatgaaagtacatagcagtaattatatttgcccccattaaacattagcagtttgcattctgattcctagaactacaccaatacagcctttcaaacttccgatgtttcttcataggacgcatcagtaccctgaatatttctaagcatcgttttccaggttgtatcccaggagatgctctgtagaacagggagcaatgggacttagggtcaagttgctggtaatagtttcagaaatctcttttcggttcaccctgtatgaaaggctgtggttttgtggtttattttgtcccaatatcctataactgatgtccttaccttggaaaacactggactggagtcatttcaaatgttcactttttggggatcctgctttcggcttctttacattttgaccacctcttccacaagcttctaccaatcacaattatcacaagacattgattcaacactccttatatatctcacatatgtgtaaattgggtatattaaagtatacttaacataatttaattgaagtagtagatttttatgcaatgttataatgacaaactttaacaacatttggttagtaataaattcgacagacattcaataccattttgtaatataagtcagagtattaaatagacttcctatttagttaggtcattagtttggtctcacatattcaaaagatgatggaaacttttaactcagttctacattctgaaggggaaatataagcctggtgttaactatctatatttttaggcctagtgtttatagtttttcaatttcctgagaagccagtgtttcaggtctggattcttaccataatcttatccagtgccagtcaggaatcagttccactatggtaacaaagtcaaatgaaaagcaggtgcatgcagacctatcctgtgctaaaactggcatatcttactggaaattgtatctctagtgccacttttctcttgtggtttgcaagccgagtatagaaacaccagcactggctgatgggggaagcagcccatgtttcctcaaaacatgtagaaaataagactttatgaccgagtgtcttatatgcctacagtgcatgtggtatgttttgtgctttgttagaggtacagaaaattaacatgttaggtccttactgcatgggatgccatgagcatgaacatagaattgtgtcagcattgtggatgaagttactgctttatctgtatacaatttaattctctttgtgggtacaaaatcaagacaaatatttttataaggtttgaaatgtcccaggattttgttttgtttaatattgcattgttcttttgttttaggatttaatatgttacagcacataggtggtgtatgctgtagtgtagtcatgagcataagggagttttgcaagagaaatgcatttctttttcaaaatctagttgtagtcaagaagatgctgatgattgggtagttcaacttcaaaagtttagaaatcttaatatcctgaaaactgatttaaatgaatgaatgttgaaaagtctgtaagttttacttttaaactgggttctgtagctcacagtctgttgtaaaactgttttgcactggctaacagtaaagaggaattcttttgaaaactaaacagctttctatattaactggccctgttctgtgttgtatggcaacattgctagcatttgggtattgtgtgcacagttctttgtatttggattgaaggagcttccactcatgaacttaaaatgttcagagaataaaggaaatcttccagttgaaatgtctgcaactgaaaattcatctacaactgaactgactgcatgctatatgtgttctttcaataatttcttttttgttgctttataaactacaaatcatgtgttagagaattaaccttaagataggaaattagcttcatgaatttagtttctaaagaataaatgttttgctctattttgctgtgatagcaacttaaattgtgtcatttaggtaactattagataagcaaattgaaattacaattctgtaatatatttttctctataaaaatctcaccaaaatattagagaaagtttaattttaaagtaattttcaaattctttttctctagttctagacaggcttccaagacaactggtatcactagtgatcccatatactcctttctacttggacaacatagaaaactagtaactctttaaaaaaaatagtgtttcaatcaaaatgagactactgaaattttcttcttgccttaaaaaaaaggcagcctgaatattctttggtttctgtgctgatttttagttttggtttttattcaggaaatatgtctgatatttttaaactcagtttttaagctatgctttggcattataaaaagcatattaatgacaccatagacttaaaatttataattgaaatataataccctcacctctaaatattttaagtactataaatttaagaatacacatcaggtacatgtttgacactaaactttttaataaactccaagctataaaatataacatactgtacacatgtgaaaaaatctaatgaatatgtaatactttgctcaccattaactgttttattatatgaaatgcatatacttactttagacatccgaagtttgagacccaatatacctcttaagtttatgtattgtaacaaataaaaatcataggatataattgaaattttgattgaaaatgccagatgcctataacatgagttctaattgatcttaagaataaaagcccagagtcagatattagggggtgaaagttgaaagatcagaaaagcagtcaggcactagagtgttgacaaaagtttctgtcccgccaggtcccaacacccttcagcaccaaataagcacactgagacatattaattattaaactgcttggccgatggctcaggcttctactggctagctctctctctctctctcttaattattaacccatttctattaaactatgtattgccacatggctgtggcttacttgtaatctggcatgttcctccttgggcagcctggtgtctcttggccacctctctctgccttcctttcctagccttttcctggtcttgtagccctgcctatcttcctgcttggctactgcccagtcagtgttttattcatcaacgaataagagaaacatttatacagaaggacatcccccatcattagagctcttacctctgtgaaatccacaggctttagaggccaagtttctgtctcatgccacccatattcctctctccacccagccatctcacttcctgtctgtctgtacagacctccagacatttatggttagctagtgcctagctctgctctgtgatcttcaggtaagctttatttatgcaaacaagatatcattacatttcccctttttgtctaaaagtgaaaaaaaaggttataactaatataagaaaaactatatacaataagtacaataactatatacaatatatgtaggcaataaatacacaattatctagtccattaacaattgacaagatcatagaaaatactccatatctatcccgtctctcaaacttatacacttttcatttctttagtgaatttcttttctgaaactgataacaaggaaaactataactatgaagtcttcaactccatcagagacctgaaaaggaaaatattacttgaataagctagaagttcaagcaagtgacttccaaaacatgtgagaactgacagaaacagctggctgcctagacagtcacccaaggttcctctgcagtgttggggcatccgtctttgacctccaggcctagcatatctgacagacttttctataaagcaggatattctgaagggctgtcctaccttggcaaagttcggcagtcctttcttttgtgtcttgcttgctcgatttggacagcatactgtcagcagtcaaggcaagagcactttcttgcctggtggctaacttttaccacaaagaaaataaactccccatggagtttctttgaagcccatcatcttttctggagtagattggtactgccaggagcagacatgtctcattgtcataaaaaggaaaagaacttttgttattaaaacatcttacattctgtattcttcagatctctgaagtatttgaagacaacctgactatctaaaatataactctgcttgatcttgaaaacatacctaatatgactacaagtttgattgtaataggtaactaattgctaacctgcatttccttattatcctaagtagttggaaatagtaactttcaaggtataaaagtttgcattacattgttaaatgagctgcataggtaccataccttaaataagattataaatatatatacagtatgttctaacaaaaataatctcaactttgcataaatatacaaaaagttcaaaccaatgtaaaatatttaaaactagtaattgctattttggcttagaagtagatcaataatctgtctttttattctatttctatatcctccttttttcttttcagagtagatttaatgatctatccttatatcctatcatatctatatctccctttaaaaaaaaaaaaaaaactctgaatcttatctctttgttcaacttttttcctgaccattaccaataacaacttgtaaccaaccccactaaacaatgacaaatatccataacccattgaaagaccaaaacctgtatggactaagagacctgctccagcccctacacaggctcccaaaggtgaaagcttctcagggacaatggagggggtgaaatgtttctataataacttgtctttttttgttgttgttctttttttattaattcaaattaggaacaagcttgtttcacatatcaatcccttctccctctccctcccctcacccacacccctcctaccccagccctacctatcccccaccccatccaccctcccctccccaggcagggtagagccctccacaggggctccgcaaagtccaccacatcatcctgggctgggcctaggccctcccccatgtgtccagggcaagagtgcatcccttcacgtgggatgagctctcaaagtcccttcttacaccagggaaaaatactaatccaccaccatgagccccctagagttcggaggccacctaaatgacatccttgttcaggggtctggatcagtcctgtactggcctcccagacagcatctggggtcgatgtgttcccccttgttcaggccagctgtttctgtgggtttctccagcctggtaccaacccctttgctcttcattcctccctctctgcaactaagttccagagttcagatcagtgtatatctgtgggtgtctgcctctgcttccatcagccgctggatgagggctttaggatggcataagaaagtagtcatcaatctcattttagggaaagggtgtttaggttttcctctccaccattgcctggattgtcagttcgtgtcatccttgtaggtctctggaaatctccctagtgccagatctctccttggacctaaaatggctccccttaatatggtatctctcatcctgatctcctctatgcttcccccaactcaatatttctgctcctccacttcctcctctcctctcctcttctcctcctctcatactggcagctccctctctttacacacaatctgagggtcatgctctttatttcctgtgctctttattgttcagtttctgctctaataatcctgtcctacttctaacttctccacactttttctagcttctaaaaactattctccttcaggagccttgaagtgataaagaaatttctttcattgtcaaaagcacattactagagcaagcaataaggaactgagccatttaccatgacaacacaagagtccaaggccataggagaaaaccgctaccagacagggagggcatagtgcccaatgataactttgagacaaaaatccatcgttaatagactggcaagtgaagaattggcatgcttttcttattaatctaggttggacatctctgactttgtacatagctgtaaggtttcaaacttataatctatttacaaaaggcctttagtatagtttgaacttgctctgaggtgaaagtgaactagttgtgtgcagttagccttaataagagaacaagacaggctgttaagagtccacagtccttgtgggacaaatagatctgattttgaagtatgccccagtatatttctatatatcaaaattatataactaaatgaaaagtcatcttctagatcatccacagatatatgtttctagtaaacaattaagacattgtgatgctatggggaaaatccccaagctgtagtgtgagggaaagagcttttcacacaagaaggacagctagctgcaatgaggacagctagcacattcagaagttggtattccttttcatcttgcagataaggttaatggtatatgcagctcaagtgacaatattcctcattgccctgttaaatgaggcctgatcttcatggtatatctctgatgggttgaaccctgaagtatttgctgagctctcactgcataattctgcattccatagcaaaaacccacccacctcacctcttgggaatgtgggtgtcatattcttaaatttacttcctgatctctgggggtgacagcacctttatgggatcctggaacgaaaagttggggttaattctcaagtcccaggagaggtagctgtatcaattgttgtccaggctttgtgtatttggaaagtgtgaggcttgtgttaagtcctagaatagtctataaggctggatcgtctaggtagcctcttcaaaactgtccagagcagtttgtagtccaaagttgatctttatgtggtgtttttaaacttagtggcattttcacagtcctggtgctatcattgtggggccccatcatccttttggagacttcaaaggtcactcttaggtgtagtcttggttcactgcagaaaacttaaacattttaaatatcatatgcagcagatttcaaagaggttaaaagatcaatatttgtcatatacatccagagtacaaaaacttaattcctagttacctaatagattctcaaacatgaaatcatgtacaagaagctagaaaaaagccttttactagaactagtagtcaatatgatcattaatatcatgacaaaaacttaaatatatatatatatatattaatcttatgaatttttagataatatttatacctaaagaaaagctttaaagactcaaaatagaaccaaaacttatgagattagtagcaataaaatagtccttgtatttttgtttttcttctgtcccatataaggtggttcttctgacatgagatagtgactttggattttacttgggtttagagaagagagcggcattccaactccaaatccagctttaatttttaattggactgggactataaaaagactatttgcattatatgtctgtagagaagcagaaacaaactttgggaagatttatgaaattgtatcatgttggagatataatatactaatagaccaaattactctttttctcaggacatttttatggatgttttttcctgtttcttcgggtatcttatttgtccattggtcttcagactccttagctgaatgtctttattctcctgaaaagacaaaaacaaaacccttccccaaccctaattatggggaggcttttttttcacattatagctgatcaaattaaaagcatttgttagttttaaagttagtttatattgaatggccatgctatttgattaactatcacctcttccagccaaggggcttctcttgctcatacctaacctttataaattttgatggtatccataccttttttcctcttgtggaaacaatagcaaaatcccttccccaatgtaatacatatcctggtttccattctgaagtcagcacatctttaaagtatacaggctgatttaattaagtagtttattctattatccaattctctccacagctgtggtttctttctcattagcattcagaaaattcaaagttaataaagcacgaggcaatctgttttggggatctttattatccctttctgttgatttagagtctcctttatagttcaatctgatctttctataattgtttgccctgtaggattgtgtggtatacctgtaatacgctttatattgttataagcaaaaaactgtttcattttactagcaacatatgctggagcattgtcagtcttaatttgtacaggtattctcatgatggccataatttctaacaaatatgtgaatcttctaacagaatcagccttttcagaacacaaagctgttgcctattgaaatcctgaataggtatcaatggtgtgatgtacatattttgattttccaaattctacaaaatgaaacacatctatctgccagatttcatttgtttgagtgccctttgggttacttcctgctgatagtggagtttggttatataaagatgaattaaaacatgcccttataatttccttagcttgttgccagtggtgaaaacctttttttttttttttcaaaatttgctattggcatgatgtgggttttatgaaattctgaggattccagcacatttccatcaatagttcatcaattgcatcattaccttgtgctagagggcctggcagacccatatatcatcatatatatgatgatatccctgattatttcttgtcactgaataaataatcaaatcagttctgtatcgtctggtatgaattcagcagtttcagtatgtaaaacaactctctctgcatattgcaaatcaataactatggtaagtggttctgtaaaatccaataataccatgagaacagcatataattctgacttttggacagaatcataagggctttgagccactttccttaaattttctgatttgtaacctgcctttcctgatttatttgcatctgtatagaatatagggtctctagattttggtttttcccagacaacatgaggaaggatccagttaagtctccttataaatttaattctcctgcctttgggatatttgttgttaatctttcccaaaagattactgcaagctctttgccaaggttcactttctgcccattatgtgtcaatttatttttttgcagattttttttatttgaattagaaacaagattgttttacatgacaatcccagttccctctccctcccctcctcccctaccacaccccccccaactaaaaccctacctatcacatatcctttctgctacccctggatggtgaggccttccatagggtgtcatcagagtctatcgtgtccttcgggatagggcctagacccacccccgtgtgtcttggctcaggaagtatatgtgtccatttaatcattaataaaaggtactacattttctgtggggtctattactcataattaacaaagtctcagttttccttttagaatcaactcatagatcttttccacataaggttttaatattatcttttacttgttgtccatgagtttagcatctacttcacaaatggtgaatgcatgccatatgagactattactttcttgaatctccttaaatataacatttcctcaggagtctgtttagtcttgcacagccttggggatctctatcatttggcacttgttcctgtagggtaactgaataaactaaagttggttgtttggaatccttagtctgttcctctctaacattataatgcaatgctaagagtggttctcctttaaattcctctgtctaggactgaatatctctatgctctcttttattaatttttttctaaaacttgtatcttagccctcatattaaccaatgttttggtgataaaacaaaaaatgattaagccgataatgtttataattgaaattacttaagtcccatctaaattaattaattaattatcttctcatttaattgttccattttcaaaacatccagtgtgctatcatacagagacctaaatccctccaaaaatacagtttcccattttttttaaatgtgggaaacactctctcttttaactaaatcctccctttaagaatttccaattgtcttaaccaaatctgctgacaaagatggtgtagcttgaggcttcttagcatgtctgatcaaagaacccaggcagtgagcatcctggttgaggacagcttcagctagtagcatgcagttgtgaactgaaagtggcagcctgaggagatggggtgtagggaaagcctgcaattcccccccccagggataggggatggggggagagctgtctgtctgagaaatgtacacagcattgtgctgaagaagcagatgtggcatggggttgcctgaaggcagaagccagtaagtctagggaaggtgagtcctgtgctaggtgcttctagagtttggatggcagctggaaactgttatagagatgctaccacagaaaaatccccaaatcactcggaggcttggggcaaaaagaaaagaaaccaagttgggtggggcactaactgtggggggaatcccgtgggcagctccagcctgggcaggtggctgcaaagccacagacaaaccacttttatttaatgcctgcctttaagttgggtgccaatatgtaacaagacatctaattggtcttagtaataaaaactcagagccagatattaggggtgaaagctgaaagagcagagaagcagccaggcactagagctcttatagctacaaaatcccagactgaaaagaggccaagttcctgtctcatgccacccatattcctctctccacccagccatctcacttcctgtctgtctgtacagacctccagatctctatggttagctagtgcctagctctgtcctctgatcttcaggcaagctttatttgtacaaaaaagatatccccaaagatgcttaaatattttgaacaaaagaaatgtgaaataatgtattggatcatattccagatagaggcatcctatcagtatctacagaatcaacaggcttataatttatcaacactgcttacccttcaaagccctcccctaagaatcattatttactaaataattttagtttcaaataaaagatctttgataagtatataagaatgtccagagaaatggacttcttaatggaataagacaatttcttatgtgatatacacctcttttagattaaattatactatgataaaatcttcattatatgtttgaacaatatcacatttgtcttttcattagcacattcatggaccttttacccttagttattgctatataatccaaattacattaactagaatatacactactgaaattataaactttaccttctcaaaaaaaaaaaaaagaaagaatgtccatcctctgcatatgaaacttcttagaatgttttcttctggcgcagtactatctctgctgtacaaactgatggctgaaagctcttctacttcaggtgtttaaatgggcatcaagggtagaggtgcatcaggcatggctgtttgttggaatagctgacatgtacatctctgtgtcaggactggtgtatacacatagccctttctgtgagaagaacctgctttataaaagattaaaatggtagtctaaactgatgaagtccatcctattaaggtttcattaggaaacataggctctgcatccattttggccttgtctgtgtttacacaaagggagcagcatcaaaggcttcatgctctggtattcattctggcctcatctcacagagctgtggttttgatgttcccaattcgttgccaggatctgagtacctgggtaccatggtgataaagtgcctttgaaatacataggtaatcagccagtgtgctggagaattgatttttttcctgttccttttctgaacaaacaaaagcagttctctcagaagtgatggggataaaaggacacttacatttactctatgagaacagaaatgataaggggaaatatgacacttaattaatgacttttcttaggcaaggactgtttctccatatgcagaacacgagcctccctttcttttgtttaaattggaaggcatagaaaaggcaaattattttggtttcaagctgacttcagatccataaaaaaattagaactgggattcaaaacacatgaattttgaaataagaccacagtgtagtatatattatttcaaataattatccacactttaatcacttgcatgtctaaaagagcacattacggtttaaaacatgccatgctgcctaaaatgactgggacaaatatttttaaggtccaaaggttttaggattttgatcgcatacatttcattttaaaaatgtgcagctatgccattcagaacgatgacacaactttctttttccaacattttacttaaagttaaattgctttgctttgagcttttagctagtaatgtaagacactctttgctatgtcagtaattattgaaaatctaacttttgctagccttcaacctgtcttcacactctttaatattttattatacatcctcattttgatattataattatttgttcctctaagctagtgatattttctttgaactcatttctctgaagattttagatatagcacctaaccactccacttcccttcatgacatattaattaaaatatacttgacaaataataaactatacatatatagtgtacagtttgatgtgttatatatgtagatattcatagacccatttgagacagtgtgcatatgttgccatcccatatacaaaattcctcattattctatgtgatctgtactttctttcatcttcaaacccttcattcaacacctggcaaccactgctccatctctgtagaaaggtttgcattttctagaacttatgtaaatggaattatagcatgcatccttttatgccctactttttacttatcataattaatttgagtcttagccatggtatttcatgcatcataatacccttctttttctcattagtattctctgtgtgagatttaagacactattattcatccatctgttgataaaatgttgtcttcagtttgggattataacaaattcctgtgaccatttatgggcaaccctttgtgtgaacaggcatttccttttctcttaggtgaacactgatgagtgaaggcatggattgtgtgttaaatgtttgctgatttaaagaaagtcaagttattttacaaatggagttatcactttaaataccaacaaataccaacacacgatacagtctcctctattttcaccattctaatagccatgcagtggtattttattgtgcattcagtttaaagttccctaatgattaatggtgtctttttctttggtaaaatatctacccataactactgagaactttgcattccagtgctatggctctgtgagttagcctagcagtttgttctttgtctccttcagttttctgtctttgccatttccaccgatcacaatcatattctgccatccacagaaatggagggaagagctgacctgaacttgattttatttttctctgttactaaaggccttttggaaaactaaattcattgccatgtttagggattgcacttatctttcctgtccccattcaatgtcatttgttaccatagacagatgagaattggtgatagttgcaaagtacaaatattcacatttaaatatcaaatgatgctttatcagtgaacattcagaacatatttgaactgcatttctcaagagagaaggctatctttccaagaagaatttatcataactaatgatttactttcaaaactggctacattattaaattgatttgctagctgttgagattaaaacaagcttttactgaaatcctcatgaacgtttattcatcccttatccttaatttatatttttataaagattagtttaatatgcttatcttgccatagatataaaatatagctgaaatattatatcatgataaggcatgtcacaatcattcaaaatagtatcctaagttatataaatgttactgtacacacaataagcaaactaaatatacattgtaatatatttttctgattatattcacttgatcattatttttcaaaactgggtacttttgtcagatacccagtttttactaccattaaagtttctgtgatctgaaaaaactgaagattgattttgaatcaatttgtagtcttttacataaattaatttaaagtaaaattacttgcacaatgaaaaaataatgttttaaccttaatataaggtatggggttattgatttttctgagaggaagtattatgaacaatcaacaacaatcaaagataatgaaactcaaattgtcaagaaaaataaccccaaggattgacaaatgagattacatgaaattagaaagctcctgcacagcagcgaacactgttagcaaagtgaacagacaaccagcagaatgggagaaatcagtgccagctacacctcagagagctaatatcctagaatacataagaactagattttacaaaaaaaaaaaaaaaaaaaaaacacctgccaactgataaatgggttaatgaacttacagttctcagaagaagaaatacaaatgatcaatgaatatgttaaaaactgttcaacatccatagccgctagagaactacaaattaaaactacgttgagatttccagttcaatcaggtcagaatggctgtcattaagaaaagaaatgacaggatgagagacagctcagcagtcagatgtccctgctatggaaacctagctatttgagttcactcaggaacccatgcaggtaatgcaaaggcaaaaggtaatggaccccacaaagttgtcctctgacctccatatgcatgctgtgttatatgtgccagacacacatgccatgcacaagcatacagcaacaataacaataatacatgaaaataagaaaatatagagcaaatgctagcaaagacgtgaagaaaaagaaattcttatatcaggtggaaatgtaaactggtaagccattgtggtaaccagggcaaaccagctgtcctatccctgcacatataccaaaatggcctgtgtatttcaacccagactcttgtatatgtttattgctgttaatgttcacaatagcaaggaaatgggttcatcctcgatatccatcaacagatgaggagagaattaaagtgttgtaaatagaggctaccacgatgactctgatactaagaatacttgctattcttgcatgaggcccaggttcagtttctcgcacccacatggcacctcacaaccacctgtgactccacttccaagggtctgacacattcttctagcctccagagacacgaggcacatgcacagtgcatacatacgcctacaagcaaaacactcatacatatagaataaagatgaataagtcctctttaaatttggtaaatatgcataataggattatattaagcccattaaaaattgaagttaggtggtttgcaggaaatgggcagatctggaaattgttacattaagttaaatcacccatattctaccaaatattcaggttctagtttctaagtttagcatatgtgtatttatgtggcaataaatgtgagtatgagtcacaaaactagaaaggggaccataatgaggagataatgacttttttaaaaagggtgagtataatagaattagtgacagatgaaaatggaaaatgtaatactgggtgtggaagtataagaagtataggtaggggagggacacagaggagggtgatagaccaaaagaaagtggttataaaaataccataagaaaacttgttaacttggtatgcttattttttaaaaatcacaaaataaagaaataattgtatttggtctttgttggaaataaaaaacaactatagtaataaaatataaataagaatatcaacaagcacgacatttattcaagcagtgatgtctatgataatacatcatcggacatttaggaaatcagtcaatgttgttagccatcacttcgaaaactctgttattagaaatccattccaattagtcttagaaaatgtaaccattctgtaggctgctgttttgtcctgttgatgctgtcctttgccttacagacgcttttcagtttcatgaggtcctgttgttaattgtatgagtgctattggtgtcctgttcaggaagttgtctcatgtgccaatgtgttcaaggctgtttcccactgtctattctttcagatgcagtgtatctagatttatgttgaggacttgagttttgtgcagggtgatggatatggatctattttcatcctcctacatgctgacatctctttagatgggtaccatttgttgaagatgcttttctttcactcaacttattgttattagtctgctgttgattgtgatgagtcaaagtgaaccttctaagtgtttaagtcacccattaagaaaataaattccaaataagattatttaaattcaatatagaaatttacttatacaactgtgtaagtaacaataacaacaaaaaaatgggtgaagaaaaggagtattaaaaaaaaaaacagaaaaagaggcaagtataccagaaaaggaaaatgcacagcgtactgtggtaatttgatgtgaatggtcggttggtctccatccaaagacagagtctgctgcactggattaaacaaacaacatgctgcctacagagataatcagtttaatgggaactcatgtgagagtatccacagaaagctgtaagggcaatatcaccatcaaagaagacagatttaagacaagaaaaatattgcaaagggaaatgtttcataataaaggctcactaacccaagaatcgatatgaactgtaagtacatacagcaaaaataattacatgaaatgaaactggcagatttgaagaagaaagttaaatacagaactaaatcaattaattctgaacaattagaaaaaagtaatgtcattttcattttcatgtcagtaaaataatatcatattttaccaacataggctctatttctatatatgccacatacatacataaactcatgtccacccttgcgaacatgtgaaaagacaaagatgtgagcagtacgtacttcaaggaactgcataccagcttataaatcttataaagcttcttctcgacctaaaagaagcaggtatttggtaaaaggaaaattaagaatttggtaatatttcataagaaattccgaaaataaatgattttgactaaagatttcccctaaaggataattagacatcaacttagaagtgataaccgtattcagcccaaaactttctccaaaagctgacaattaattggttactaaggtgaaaaaaacgcggaatatgcttaacagatttaaaagtcccacatgagttgacatttttgtcacctcctggtactggggatggaaccatcctgagcctagtgtattacaccaggcaactggctgcttttgatctacaattccagtccatgtgatgtttgaatgttctcaaagtatgagaaaaatgcacaatattctactgaagaagcaagtaggactatgcaaatgaggtgaagttctggtgaggattttacaatggtaaaatcccaataatataaaaatatgccaaaaatgaatatgactaggttcaacccagacgaccccatcagtaagagtgcagagacctagtaatgtgaagatttattaacaaggtgtcacatacatgatcttgggaatgaaaccatttatcacgatgtgctgagtagtttttactcatatattctagccacacttttcttactggctactcaaaaaagtatgaacaaaaagaatatattgagaagagcaactggtctgaaaaaaatgttgatagaaaatgggtctttcatagtggcaaataaaaggaatttgggttacttttttttctgaagattttatttattatgtatacaacattttcctttcatgtatgcctgcttgctggaagagggcaccagatctcattacagatagctgtgagccaccatgtggttgctgggaattgaactcaggacctctggaagagcagccagtgctcgtaacctctgaaccatctctccaaacctgggttacttttttttttttaatgagacataccaagagatggcagtataaattatactattaattaatagttgtaacttttggctctagttcttcatttacacaagtctgaggatgacaatgatggtactgatatttctaaaatcactagtaatgtttctggaggtctgatgcttgctgcttacatggtatagtctgcttaaccttcgtaatcacactacatttattctaagtgctcagattagctccattttttgagattaaaaagcaggaccttttcctttggtgagacctatatagttagaacatgtctcgcttaggacattagataggaaaacatagatgctctataatacctgagctgtcatggttaatttgttttatttttaattgtaggaattcttcacagaataattgtgaaaaaacaaataagtgggcattttttctttaaaaccagaccattgaattatttttctagtataattaaggccaacaaaagtagctcagcatctaatatatgtgtaacatggttctagatatggtgatagggcatagaaagaaaaaaagcatcaaacatgtcaaaaaaatatatccaaatagtaagtgtagacaaaagcatgttaaacacttactacatgctcatttgaaactcacaagtctgagaaatatctgctgacaccttcacaggaaaggagcagaaactaatcttttacctaaatcaaattaacacttggtttctcaagtgtttgagagacaagatagatgaataaatggtaggaagaaagagagagagagagagagagagagagagagagagagagagagagagagagagagagagagagcaatgatacaaagtaatgcagctaagactgtgtgaagtcagaaggggaagaactcaatttgaaccagtttggacccagtattcttaaggtggagtggaatagtgtacatgacaaatgcattgtataggaatgaacacagcttgtttagtatggacagtttattcattaatttactcattccatgggaatttattaaggtcttcctgtcagctactcagtgcactagttgctggcatttgagaaatcagcaaagagcatgacaagcacagatgactgtgctgggtgatgaatgctgttgcagagaaatggagagaggccagccatgcagagcataagttgagggtcacagaggaagcccttttgtcctgtgtctctgtattagctactattctgttgtaataaagcaccatgactaaagacaattaaattgggtttaaggttttagaaggcatgccaagaatgactgggaaggtatcacaggaggtggtagatcagaaagctaagaaaccatgtcttcagtcatacaaagaaagcattggaggtggggcaaagctatggactttcaaatcctgtccccaaagattttataatgttctctaattgtatttcatattgttgatattaagaaaataaattactgtgacaaaattgatgaaagaaagttgattgctctcataaaagtcacacatccaagctcatacttcagtaaattaaaaaaaaatgtctcttctgtgattctctcctttggctcttcccataagtaacacaacacaaagccattgcttcttaatgtttctaggcctgaaactgctgttttaatttttcaatagagcattcacacaggtcaaaattacacattaaaatgtaaatttcttctgatgaataagttgaaatggaaatacaaacttgagtaggctgtcagcatggctcaaaggcatcaaatatgtaccactaatatttctgactatctgtgcagtatacactgcatctttaatgaataagttgactctgctcatgaaaagcataaatgcaatcacctgggctaagataggggtttttaagatttacttatgagcagcagaggcatccctagaattcagcccaggcatacacatttgtgacatctgcttggctctccatattctgaatatggagctcaacttcaccagttccaatgaagacattccacttaaagtacgatggcaattcccttcattatggtaaatggtgttagttagtgataaagttgagcatgggaattgtgaccaagatctcaatgcttttgaacacataaattataatctgagtaaggagttgcaggcttgacaaacagagatgggcaatgcatagggttgaagaacaaaggagacactgtgaggaaatagactcagagtggggagccttggtatttcaacactagccatctaggtttttaagcaataggtgagtgatagaatttgactgcttcttcataattactgaatgcctgtatttgttgggagagatttctatactgaagattttttattttttttattagttcgaattaggaactatattgaaaattttttaaaacaatttaatgaggtagtttatattttgtgctgatttctaccttgaaatattctaagattgtttatttaaaggatagctttgctgaatattactcaagataaaggaatcctgcttcccagtagcccttgcacccacattagggagagaaagagcctcatttgtattcttcattgttcccttccaggtgttgaacattccaccgaggttaagggcagtacacaatggattaggggactgctcttcagtacctgtgacccatgcctatctactagcagtctgtgatgccatgagtcagataatgagaatgagtgcttagaaaaggtttcggtaatttgatgttgtcatgacacctaagtatacaatttttatatttaacaaaaaatagacattatttgatttaaagatttttaatttaaaaaaaaagctaaagcaaatgaagtaaatcctattcctttcctacactgctttataggagatcactaagtattttataacaaacatactctgtccttagagatatcattaagttcttagctaagagactaaaggaatgtcttgggaactcatggataactagagaacagcattattaatttgtggtacatctacaaaaagtagtgccatttctttctgctttagtataataccaaacattcatttggttgttgatttatttgattgattaattgtctcatatgtcccacactggcctctaattcacaatgagactaatgcagacattaaatttatcattcagccacctaagcctcctccatattgggattattagcatgaacctccatatttggctatgctgtcattttttaacttaattttcctttaatttccaatgactacacatgatctacagtgttactactaactccatagtaatttagtttggaaatgacaaaaacaattaagtgactagaaagaggaaaggccccaccttagaaaccagaggttatggttcttctgtgatttcttgatcatcattttaaaaaaaggaatttcagaagtttatatgagggatatcttgagacaaaaagtgttgaagttcttgacagaggaaggtatgattagtaactgaaaagacaacacagtgcgtctgaactgatgagctatttttagtgtccctcatagaatagagaagaaaagaaagaactgattgtttttaaaaattcatttaaaaagtgtttcagtaaaatgaaaagtggtcctagaagtgctcccagatgccagacctctacagctatgaccaattagtcccaggaataaggtctatgaagaagattacttcaagaagaatcaccctgctttgttttaactagtgtacttactttcagtcacctttatcttaagtgtgaacactgaacccacttcattggtcataggccactgtttcagagtggggtacttataaagtatacagcagatggaaatcccagtggaactgaataaacagtgcacacaaggaaacacagtttcgtacttgcagaagctgtagcggaaggtcagcgatatctttccactcctgcatgtccaagtcttccttcccaatcttatagacctcctttctatgtccttgataataatgatttctaaaactaataagtctcagtttcccattgtctaccctcccatagcctttgggacctatataatagttcattattttaggatagcaatagctggcaaccctcctgtcttttgcattttatttttgcctttcctgtttttatatttttccaaaattgttgaatagggcatcttattttcttagtcccagacatctggcttcaataataatgatggcagtaactgtgcctgtttgactgagtgctgactctgcctgaggatttgtgcttagtatttggcactcataacttcagagaatcctggaacaactctctgagccaagattatgcctatcaagattttatacatgagatactaaggcttagatggagcaatttactgcacagagacactattgacagaactgggatggagcccaggtctgcctgacctcaacacattctcttaactacttctttgtttacaactgccaggaaaatgttctactttgaacttccctactggaagaggtattgtcataatccatccagtgatcttgtcaactagtagtgttaccaccttctgtgggacatttaaagttagaagggcattttgttgtgggaatgctggaagtgggcatgtcctagtatttagtagtgagaaggaagtgagatacagcagtaaaaactgtcctgcagttctgagaactgcctcacacaacaaaaaattaccatgcctcaaatgccaataatgccccatttagaaacaatgataatggatgagaatctaataatggattcagaaagcctaaataacttccctgaatccggagcaataaatcacccaagctccctctgactgtaaagcttgtgttttttttttttttttcatttgattcagctccatctaacagaacattaaaatattatgtataatttgatttgctcgcagaattattgtattttacatgcagcatctgaaatgtaatttatttagagaacagttaactaatttcctgattgaatgttcttttaatatgtttaatggagatagcatgtatctgagtatttgccagattttcagaggaatgctgaaacttaatgaaagaaaccattaaaattatattaaataaagagagcagcatattctggaacatgaaaccttctctattaggaagaaggagtggaatggactcatttaggaaagggaagaaaaagggtggaagaaagcttaagaaagacaatgataggagagaggagctttttacttgactatttagttaatgaacatctatggtgaggtctgtgtgtccactacagtgtttgcttctttataaaatttcattttaaaaaatttaatcacaaatattttatggtctaaaggtttgcccaaattcaacaaggtgatctacatcctatatgtaaaggtacctccttaatgtgcccttttccagaatatatgccatattttaggcagcatctatagaatttgctaggcaaagacatcattactcctgatagagggattatgatttccatgatcatagacagcataccactcgggtctgcagaaagcattcatccttccctgacattagggccaagtactaccatttcataccctaggaaaatgcagagtagctggagtctggaacccatgaaacacatgtgggagaaactgccacccaagattgcctacaggagagatgaggtttcttcttgccaattttttccttcctgtttttataactttagatatatttaaaatccccagtgcagatgattttctgggaaccagagaggccagaaattacaaacttgagcatttataatatcctaggttcttatttaaaatgaagattttaaaatcctctgttacactttaccactcttagtaatgagggaagctgtgtcagcaagtgcttgcaagtcatggactgcatggactcatgggcctcactcccaagatgtttggtactcaatctccttactaagtagttattgaatatatggatgtacctggagcctggcctgccatgtgtatttctgtccacaaaggccttagcacataacacaccagcctaaagtctgaaatatctcttcagtgacttttgaaatcttactgtggacaggcttctattttctcggctgtcatactgtctccaggcttgttatcacatcccctctgatccagatgcctcttcagttcatctttaaaacagctaccagagtcatcttccctaaacctttgcttatattcatttaatagtttcgtgatggctctgtccacttgtctacctaatctccatttcttgtcttctctgcaaacacaccaattctcatttttgttcccattatgctttatacattcctgtatcttgtctttacctctgcaatttccctctcctgtggaaaaaataacagttaactcagcaggcctgagttgttgcaaagcctgtaaagttcaaagaaagcttgtcttcaagactagcccttggtcagctcccaagacataacctctgaactcttgaaatattcttcctgaatagtgttttggtatgcctgtagccttaggacatgctatcctagtatgagaaaatcctgacaatgtgatttatggtaaaagccaatttggggccagtgcgatgacctgagtctgatccctaggactcacagggtggaaagagcatcaacacatgagagagagagagagagagagagagagagagagagagagagagagagagagacagacagacagagacagacagacagagacagacagacagacagacagacagagagagacagagagacagagagagacagagacagagaaatttgggagaaggtggctttgaggtatgggccataaagagacggcagaggagcttgggtagacaagagctgtcatggaagctcgcgtatctatataactgattccccaaaaaaccctgggcactgagactcaggtaagcttccttggctggcaatattatgcatatattaacatcaataaccccatgagtctacgtccaggaagtacaaagaagattgtgcgacatttcttctggatgtccatccacttctgtacaccttccctttactgactataatatatgaccttgcattgtaacaaaccataacctgtgtgtataacatcttttctaagctctgtgaggccttcccacaaatcatcaagccttaaaaatggcttaggaactctaacatgaccccatagggccaacctctctttttttctcatagtacacaatgcagtagccatccatggtttcagttaaacaaacagaaaaaaactggcgtcatcacagatcagtgatccttattctaacataaacaatatcagaaggtcagtagtagcctggcaatatgtcataatggctatgttatttgccaactgcatctatcatgtcggtgttacatcatcttatactgtcacatgatggagtgatagggttcctgaaaagaagaaacaacattcacataacttttattatagtatactatttttagttgttctattttgttcaaagttatcaatctcatgtgccaatttttttaattaaattttattatggatgtgcatataggaatcaaaactgtatacttaagacctgtccatggtttcaggcatccagtggatgtcttgagtagatctcctgcacataaggaggagcctgatgtccattcttcaaggggccactataactcttcctttctacctagctttctcgaaagggagacagcaagcagagccctcttctgcttagagtgcctgctggaaaggttttcaggaaaaggagcttgtccatattagcaaaacttaaaatgagcatacactctcaacctgcttattctttttaccctgtaatgtttcatagaagggtgcagtcagattatatctgtcttgttgaagaaaaactgaaaacaatctaattatccactaatagctgtattaatacaataatccctttataataacaaagttaccattactcaatacattctattcagctctgtcctaattgctttgttcacatattatgcttaagtttacagcagattttccctagaggtagattacattcacttaaacaaacactaagacacatgattaaaatctgtgtgactccatccatataattatgaattatataacgagacaatcatgaataaagaatgatagaaatatgtatgctgtcatggaaaggttcccatcacctatcgagtttaaaaattaaaattatatcctaagaccattttatattatgctacaattttgtgcacacatgtatccacacaggaaatacactacagggctattaattaatttgtggaattagtaagagtataactttttcctcctaagtaatgatgaaatgatgaatttgtctattctcatgaaataatatgaaacagaaaaaatacatctgaaattaaaaataaatattgtacatatccataagtaaatgaggagagtttcaacctaaatttaaggcaataagaatgtatttatatgtactataagttctactaatacattggtgaaaggaacgagttgttgggttttgttacagatctatttcacaaaaacactgttttcaacatatgtaagagtatactcatagatctagttcagtatatactgtacataatctcacttgcagaaaatttttaaaaatggggggaaaaagcgcaggggaaaatagtgaccaatttttcctaaaagcagcatttccttgctatattccaagaataactctatgagcagatatgccagtaagtttactcagagaaaggaaaaggaatggaaggtaggaaggaaagagtttagtatcaaaaaatttgactaacactgatttccccagcttctccgtatcgtactgcagagatgtaagttgaataagccttccaataaaatgctttttctctcatccagtatttaagttgtttaactacatagttaactatataacctttgacacctaactgtctattcctgagcagcccacacagatattgcttcctccctttgagaccagtgaaagcaactgtttttatgtgcaggaacattgtgttattccattctgtgggatgcaagcatgcatgccctaaggaagatagaaatgttcatgtctttcttgtggtcatctcattgctttttgtagaccactgagttccttgcattgtctatagaaactcattacaaagcaggatgcacaatacatatgtgcaggatttctttcctaaatatgccagctgtgttttcatcagttctgtatgggcaacttcaaggtccctgccgtggttatgttcggttacaagaatactatgcttaaggaagtccaaagccacagtttttgtcaattattatttagttcttctagtctaggtaccatttaccaatccaagatcacttttactgtaaatcaggttgacttactgtaaacacagtcagtgtagtagccatgtaattgaaagttgaaatctcagacagaaatgcagatatgttttgttaatgatctgcaagcattcctaaagacaaatctctgtgcctgtatagggttattctttaatttaaatttctcccttttatgaaaaataaattcttttctcatataacaaatactgattacagtttcccagttccttctcacctctatcccatccagtctggatccactcctttttgcctctcattagaaaaaaaaagacttctaagagttaataaccaaagttaacaagataaaatacaataaaataaagcaaaaatcatcacatcaaagttggacaaggccctaagggaagtcataataatcagacactcactcgttctcacacttggcagtcccatcagaatactaccctgaaagctacaacatatacacagaggacatggtgcagacccatgttagccttgtgattgctgtgattgatgcttaagtctctgtgagttcatatgcactttgcccaactaatttagaggactttgttctccttgtgtcttctatcttccctgactcttacatccttcctgcctcctgttccaagaggaaggaggatctgatggagacataccatttagagctgtgtgtttcagggtctcactctctgcatagggtctggctatgggtttctgtatttatttccatctactgcaggaggaagcttctctaaagccggttaaataaggcactgatctatgagtatagcagaatattattagaagtaattttaccattactttcttttttagaccagtagtgcttggttttgccctaggtctctggttcttggtcactgaaacagtattaggtatgggttccaatttgtggagtgggtcttaagtcaaattcgacatttgtttggttactcccacaaactttgtgattgtttgtgccctagcatattttgcagacctgacagattgtagatcaaggttttgtggctgggttgctctttatgtttctcttttggtaacctgcataggaccttccagtaccaaaggcactaggacataggggcaaaggttctatgtaggcaccagcttgccttctccatgttcactgagttgtgtgggtgttgtcttcaggagtgggttcttgtatcagtttgtggagagcaacctgttatcttggtaacagcctgaattagttagggattttcatgagacccattgtatgtaacccaatcctggtactagaagcttcatttggtgactccatctccctcattatttggagacttcattaggatcttagtttttaaaaagtttccactgcacttggtttccatacacccttcagataaccctcaattctagctgtcactcctcacatttcctccctcaataccatcttccctccctctccctccccgatcctcccattcctgtctcccctcctccagcccacccataaaatctatttatccccccccggaagatccttgtgcctctccggtcccttcctctatatctaatttttctgatctatagattataacatggttatcatttacttaatggctaatatccacatataattattttcattaaaatcaatccccaaagtgatactaagtcaaaaaaatatgttctttagaaacttctgatgcatgaaactgaaatttattttctagaaaggtataccaaattaaaatataattggcagtatatgtttcacagctagatgctcacctgatttccaagatcatttctatccttctttacctaaatagccttgctagcatctttaacattccacatatttcagttacttatccttatcttccaaatagaatggtcttctcttggtttttctatatgacaccatcagcattatctttcagagtacactagaaatggtatataatgttgaaactatatttttctagtgccaaatcaattagaattcttaactcactgttttcatgccttcctttttttgttccactgggtgcttcaattaagtttcatgcatacattgttaaatgaatgtgtgtccctcatactagatacattataggctttctgaagctagagataatatttgtgaatctctagctcaaagtattatgagttgtctgtagggcaggcactattaaacatacctaaaaccaccatcttaaactattcttggatataatctatagtcagtatatactagctgaatatgtgaatgagcgctgacacagtatcatagaagacgaagttcctgttttcaggaattatagattttaaacaagagaggaaaataataaaacaccaataagaatgccatcctatgatgcatggagatatgtgatagggatgatttttagaaaatgctagttgactactctcaataaggttgtcaagaaagtgacagtggtgtggtgtggaagtgacgagctgagatctgcatgcttaggagttggctgtacagtactagataagggtggtcacagtatacataaaacctactgcagattgtggtagacagactagtgtgttcaaggtaaactcgggagtttaacctaaccctctttagatattacatagtagatttagatatgttttcttaatacccactaaagacccaaaagggggaaatattctcaagtgtaactagaggaatatgatttccaaacatttagtaattgatacatgaacattaatgaattataactcgtttcagccattgtttctctgttcctaccctttagccctccagttagctggctccccatctctgagtctgccctggacttgaagcacagagatcttaaagagcaaaagtgaattcaaaaccatcttatgtttctttctgagctcttaatcaaatgcaagtgcaattctctatttttattgcatggaatgtaaggggcatcataatttttatgggtattttggaatgcttctaaagctgctgggagatggtttggaatagctgtagcaaaagggcaaagcttcccaaactttaatctgaatacagggcctctgaagaccttgttcaggactgactctggtttggcaagttttaggtggggcctgcatttctcttcttctaaatccttccagaggatgcttgctgctgcacatccacagtcctcacgtcagtaaaatggtatagaacctcagctctgatctcagatcacccttagagtctataaaaaagctgtgccatcctccaacatcaggctacatcccaagatgatgaagtctgagttggtaatattgggacttaggactaatttacagatgtcctgaggagatcccattatttgagaagtcatgacttagaagtaaagattcgtaagttgtcctattctgttttatcaagtcctgggctaaattctagtcacagatgccccaccactcgttctttcagaaaacaaacctcagaagaagagtaagccctgcctatcacaattctgaaagtctagagacagttatagtggcttaaaaaagcataaaggttttgtttttcctgggtgtgcttgagcaggaagaaatccttttttgcccttaggctgtcctcagtttaaacttttgttactgaaactggcttcttttgttatgacctttcattttctgaaaactttaggcaaactgaggcagaaaataagggacctgctccttattggcctttaccttgcagcccaacagcatgaaataatagtctaagattgaatcatgttagtgttctttccaaactcatggaaaacgttacatccaaccggagcccactatatttaactctcagacggtctttccattatacatcccagtttaacaaatgtgttatgctgctatagaatcgtgctgtaagccattgcttggctatagacagtttcagctgaaagatgttttaaacataatggaaggatattcattgaccaaggagagtggtttcaaacccaatgaaatacctgcaatgctcagacattcttattctgttttaccactagaggtcttgatttctaaccagtaaaatatagtttgttcaaacatattgaatccaaatgtttaattggcaaaatatttgggagtctgtgatttaaactaaatgcattttgtgggtcacaactcagtgaggaagaagaaagatgttctttgctattcttcatgtgcagaactagggtgaggcaagattatattctttgaagttactgaggctgttgcttgcgttttctaaagggaagagctacagggggggatgtagccatgcctacttaggtggtcaggcacacctgtagccagcccctaagtaggcgtggctacagcttcccctacagggggagggaacagctgagttgcagtctagtcacttcaaaactcccaaagggtttctaaagtgcctgtcataaattcaaagttgtagaaactgctgacatatttaggagtgtcaacattaagataaatatcgaccagtatatcatgacagagatcttgatttctgcttattggtgttgtgggtgttttctgagatagccctctcccaatctccagaaaagagctcttgccttttttcctgtgtgtccttttctcattaagagcgtccagagcatggaagtcctagacttcatatagtccatagcatgtgtccctttcctctctgcctctcactttctctcccccacttgtgtcccagtagaacccagctatacactggttgcatcaagtagctctctccagagcttcagtctacagagcatcaggactagttgtgttgtgctcaagtcaagccctgggattttgtatgcccttaagatagtatatatgtgcaactgactcaaacttattttaagtaagcatatattgaagtcatgaaatttgatgtttcctttgaattaaaaatgacataaaataacagaaaggttctatttaaataactataaatagaaaagtggtcattaactttgaaagcatacttttttaccctgtgtcaaagatgctaactaggggatccaaggtcttctgactactactgtcaatttgcttggccatctttattataccataatagttactatcccatatttaatttctaaggattgagccaaattatacctcctcctcttctccttgtatactctctgtcactaactatccacacgtagctcattggtatcttcgatctctctgttctctagcaacatggtccttagctctttgggctcagagactgtatgtaattcttggaacgatggtgctgtaaaagttcctagcaccgcactcaataattatttatagtacaaatgaatgatgaatgaacaaatcaacaacatagaagtttaggtatctatgcctaaataacaacttttgggtctatttactggtatcccaaatgccttctagttgtggttaaataacttgagaaaaatcatttggtttgagtgaaagtctccttacctaatagtggcaagtagggatattaatgatgactagcatttactgtgtaatcaatttccaagaactgtctgaagtacttcacgttccatacttcctctaatatgaagggcactgctactgttacattgtacagatgcaaaaaaaaaaaaaaaaaaaaaaaaaaaaaaaaaaccagagcttctagtcaaagtcactacagccagcgtttcaaatccatcattgtaacttcaactgctttgggcaccatgctatgtgtataagatgagcacacacaccccaccttctttccccaagtgtgtcatgactattccatatcacatcacagtctgagattagggcatcagcagatgaggtccatctgagtttggaagagaaatctgttcttctttcatcccatagcttgtgtttggcctgatgaccatctctagcatcatttctcacatagcagcattaccttgtttgcattcgtgttcatacaacatttttatttaaaaggggggcattccatctcctgaaggcaggttattccctttgctgtacttcagaactcttaaatacatgattctactgtagtcttttattttctcagtacccagcatagtgactagcacataatgttcagtatagtttagatatacaatgaaagttcagaaaagctgaaatcagcacagaagagttcacaaaggcatattgttttaaaactagaacaggtctcatatcaaattttgtctagtgtttgtcataagtgttcatccatattttgttaatctacaccactataaagtggtgaacaaataacccaaaatagtgtttgtcaagaagatatttctaaggatgatagaaaagccaaaacgtatttataggataattatcattccccaaattctcaataatataaaacatatggtctatagaaaccttgtacatattttaaataagttttaagcattataactagataaatcaccctggaaaatctttaccatgataatgttattctaagaaataagtaatggataagatttatctgctattttgcagaaaccaatagcaatgagtttgtccttctttggtatttattaaatatcatacccctagttgaagtcctttttaacatcaaaatcagattgctcgaatacatagccaatggttatctatagcacgcttcagatatctctaaccttttatcacatcctccaccttacttacatccctaagaagaatgaggtacgttctaggactagattctctacacagttccaaattcatgagcacgtctattacacaagttatattagtcagagtcacacacaaagatggtgtgaactcctgattgctctagagagccagagaaagtttcacaagtactttggtctaggcttcaagctacggctactgaatggtaacaaaagtaaaagaaaatttttcatgggaaatgttgcatgtgaccctgcttggacaccccttgggggagggggggggagaagatgcagcaccaacaactcaggcactgggagtcgagtgagtagcagagcattctgcaaactcatttattaagggagatagacctgcctttatacctcctcccaaggtcccattgactcatgcagcggacttggttgcattgtcctttcctcattggtgtctcttctttagcctctgggcatagaggcaggtttggctcagggaggaagtgcctgccaggcatgctcatgcctccaggcctgggcatctggggcaaagtgactgcggcttgggtagactgcctgcagtttctcctatgaggaaaggcctgctggttttcaatttggaagactttaaagtggtggttgggttatcactttcgcttgcctttgaattggcatctgaaaggtcaactatattttgcaaaaggaacagagtcctagtgaaagtacagtaaatcttctaatctctgaacccaagaactgtagccttatgtcctgcctaaactctgagttaattgtgacccctacttgtagaacctgatcttagaagttcagaatgtacagggatatggatgattcggtcagtggtagaacacttccctaacatatatacaaaaccctgtgttggttccttcctcagcactgagaaaaagaacaagaaaacttgccataagttccgaatccaaggagaaattttgatcattttcaggagcctcctgggaggatggggaatgattagggcaagtttctttatacccaagaagccatttttccttcccattgtgaagtgtctccaccatgtcaattattgactcagaaagtcataaccacttatttacaagtgggcccaactcagcctccaccgttagacctcattgcaggttttagagaaaatcaggccaagtcttttttgttacagaagaagcaaagttgcctttcttttcctgtgtcaactgaagttcagtatagcatgctataggatcactggtgaggtcaaagggaaataacccttaaagaatcggaagtatgaggaaagcttgtatgtattgtctctgaagtctgaaggcaatatctttccaccattcctcttcagccatgcagtttcatttactgaactagtttgagtagcaactgcatgccaggaacgctgctagacatcagtcccaaaacacaagcaaaacaggcaatcctttggatacagggctgtattttgtagaggaagaaaaatagatttgatcttatggcaggtgctataaaggtgataaatgggaagtgacagcaagttggcaagttggggagactttagatctgggaagatttgttggaagcatgacatttcagctagggcatgaaagataagtaggaaacttcaaatatcagcagatgtaaagttaacgagctagtgttttttaagatttatttatttttatcttccgtgtatgagtgtttacctgaatatatgtatgtgtactttgtgtgtataatgcctagggcatccagaagagagcatcatacccactggaactgcagttaaaaacactttgagccaatttgaatcctggaaactgaacctgggtcttctacaagatcagaaagcgcatttaatcgataagccatccctccagtccctgagctatttcattcctatctcacaataattgccttatgtagaggtcactctccatttaagtaacaagaagttggaagtaggaaaagaaaaattatatgattattaggtttttaaacgtgtactaatatgaagatagccatagagaagtgatactttcccattttgccttaccacgtcacttcctcaaagagtgacaaaattattttaactgcctaagctctagtttttacatcctcatgggaaacataaagatccaccttccagtgggatctggtgagtattaaatgctctaatatgctgcctagcaccataatgaattcatttatgtcccatcattgctaccttgtttacttttggttttcattttcagggccaggcagagaggcaatgtaaagtgtctaggatatgaggtaattacttggtagctgtgtgtttctgagctgtaaattgtagaggtcacctcaatttcaattctgcctaatagtccacttagtgttgttaagggtctaaagggacccagtgccctttaatcagaagcacagttctgcagagcacaagtgtctctcactggacagggactgacctgactgaggtgatactggacagaagtcaacagtgcttgcattctccatctgtaaggagcaatatctgtcctctgaagaccagtggaaatgcagagaaaagcaaacctagtcatttggtttcctatcactgcaagccttgaatttcctgagtgccctagagttctgttgcctcaatccaaaattgattaacaagttcgcaggggtacatggacatagtgctactatggcaaataccaaacagacatgaagagaaaattgcttcatatgtttgcctttatgaactgcctttctttctcttcctgacatccagtaaaatatatatatatatatatatatatatatatatatatatatatatagtggtttgcagaacactgactccttgcaatgaacacttacaagtaaatatatatggataaaagggtttacttgtgtgattcaatagcttccataatgagatttatttttccatttttttctcttaaatttttttgagggggaagttgcaaaggcagagggtggatatgaaaggccagtgtggtgatatattatttatgatttattaaagcttctctgaagattcagaaagcaaagtcagccataagctatagaagccaggcacacaccattaaccccaggactcaaggttaagaggtagacagatctctgttagttcaaggccaccatggcctacacaagagtgaagagtaacagagctcatgcctttaatcccagcattagggaggtatataagacaggagcaaggtctcagagttggcattcagtctcaggattctctccagctcactgagtagaggcagaaatctgaggcttggtgaagagctcatggatcagccatttcagcctggggtagtgattaagagctagtggctggctgctttgcttttctgatcttcagcatgaagcttaaatgcgatatctgtctctgagtctttaatttttcatgctacaggccagggaaataaatgggattgtgatacatgattgaaagacacaaaaaataaatttaagaaagtatatatatatatatatatatatatatatatatatatttggttgtggcatggactctaaattgcttgctgaatacccagcagtagacttaatcactataaacttctaaacacatttctattaatggacataactgctggaaaatataagctataagagctataaaattcattttgctgtcaaaatgaaaatgcaaaactaggcttattcttctcaaagcttttagcagtcacccccctttcttcttccacccacctcctactgccagatctctcctccctacttctctatcagccaaaaaggaatgaaagaaaacctcataccatatgttcccatttaacagtaaatttttgccttacaagaaaattgaaattaaaattttaaaaatggaagcattgtcagttcttactgtgtctatggtaccatgcaatctgccctccttttatttcttccttgttctttcatccatagagacttttccaggcgtccatttttataagccatttccatgtatttcctagggaaatgcagcatttgacttcttacctgaggctcttatttaaagtatcaaccagactaagatgagaattgagaaacacacctgctcttttccaagccttgttgaagactgtttcattttttttctgtctctcataatccatacacaaacagtgtttttctggtagtctctataagcagtgttggtctagaccagtggttctcaacctgtgtgccacgaccattttgggggttgtatatcagatatcctgtaaatcagatatttacattacaatacataacagaagcaaaattatagttgtgaaatagcaccaaaaataattttatggttgggggtcgccacaacatgaggaactatattaaaagttcacagcattaggaaggttaagaaccactgttctagaccttataggaaaagcaaatgctaaattaaataaggccctgttattttttagagattatagtacagtaagtatagtatagtacaaaacatctatacacagaacaaattaactacgccaagtaggcccttactttaaaacagttgttcaggaagagtcaataacagaaagaactcaggatggcacagctagagcaaaacagggcagattcctgagtgggactggctctaaaggatgcagtttctagagaaggagtatgaagaaaaagctcactggaaaggcaacaccttaacaaataaagaaagcactattgccatggtctttgtctcacggaaaaggattttccatattgaatgtacacaatagaatggagtcttgacacacagtggcctttgttatgcttctgcttacagatgtgtctcacatccttagagcagatttctgacatctagttggaagattatgatgaattaccataataataattcaagatctgcttggctaacataccttgctataagctagcccagagttggaataccattatacccatttcataacgaacattctgattgttgtaaagaatatgtgtgaggagttttgaagatggctcagtggttaagagaacatgctgttccttgttccttcagaagagccaaatttgattcccagcacccataatgggcaacttgcacctgtaactccacctgaggaagatctgacaccttgggcctctacgggcacctgaacagtatctttctttctttctttctttctttctttctttctttctctctctctctctctctctctctctctctctctctctctctctctctctctctcttctctctctctcttctctctctctctctctctctctctctctctctctctctctctctctctctctctctctctctcacacacacacacacacacacacacacaaataaataaatccttttttaaaaaataatttgggtgatgaatcagaatgcccaaaaggttgacattctgtccaaagtatgtctctactgctccctttgtcattgtctcggtcattctatttctgtccctctccccacccccaaatgtgtgtatgtatgtatctgtgtctgtgtgtatgaatcggacatggcttttcaaggagctcatttggctcttaatttgaaaggatggaaggcatgcacactgggaaacttgctgcaaaattatctcaaaagtcaaatctagcatcaagactgccagaccttctgttggaagtctatttgagagttcagaagattgatttaatggactcatctagatattgaagggtgactacgtagtgaagcagttgagggagagggatttcataacactttgtgagaagaagtagacattctaggaaaatgtgcctcctgggttcaagttaagttgcagatggcatactaaaaatttcattatatcaatggaaagcccagagagcctagattcttttctttatgatatacctctcacctttgctttgatttgaatgtccttgcagtcattcagcagaagatgtactaagatgtactaggcatatgtgaatgtgaggctccaggaagctacccaggcagtttgggcggcaaatggctttctttaatatgatttacatcatcctcttcattgttcctgcaccctgctgatgttttcctcactgggatggatcaatgcttcagataatgagctcacatttagtactataattttgttagacgtaagtccccaaactccttacgaaaacaaccattgtatgttcatgctttgtggatgaagaaacctgtgtgtattatggaacgtgacacctaaacattagcaaaaatggggagggctgtttccggttaaaattcccccaaccaaagacgttgctgtaccaccaaattctaattcccagttcttgatcaaaaagatgaactcttaagactttagaggaaacctggggattttagctaggcctgatgtctttcctaaaacatgtagatttgttttaaaatatgaacagaagaaagaagctgcatttatatcctgttctcttttaccagatcatttagaagggctatgctacataaaatctgcaagtaggacttaatgggctccttccaaaagccactggtggtgtgtaaaaagcaataaagaaaatatattaaatctcaagacttattatggtgaatttcaatggtaaaccacaaaactacccagttctcttgaggaaaccaacatgctgaaggagccaaaactgctcagcagaatacctcccaccttgagcatgagaacaatgaatcaattgataggttgccatggccctggagtagctgccgtaaagcagttgttagagcatccactagggtttgattcaaactcggggcttactgtactttcaggatgtgttaccctttgtgttgtgaatgttgcctttgaggtatggagtgggtggcccttcctgtgaggtaaagaagggtcttgttccctcatctggatcccattctcagctcagcagttaaattgtacttgaccttgggcactggcaaacctcagctttgccttatctataaataatccccatgctcccttcagtttctaaagttaccgcatatttgatttctgttggtctttttttaatatattctttcttgatattatgttaggacttctggatacaggcttcatagcctttatcaatataagacactataagaaaaatgtgttatcaaataaaaataaatatataatatttattatcaagggaagaaagaaaagcatgctatatgtatacatcaagaaagtcataagaactttaatctgctagacctcagctgtttgtccaagccctgtgacactctggatcacctttggctgcgatgcctagcatggggagaaacactgtggactgtttgtgattcacttggttggaacagaaaagttgtctccaacagcaagacaaatgtgacaccctttccaaatattgagaataatgttgaggacatgttttaccaacaagtgttattaatgatgataccacacacagcatcttctattctttaatcccctaaatttactagaactaaggtcacttgggacctcgtcagcctttactggaggtggatattggtattaactttcaaacaaaaaagactcaatgatgacttgctatacagtgtaatacagttatttaataggcctttggttttatttgttttctgcaaaataaattattgggagggattttttgtaatataaatgtaaatagcatgttgactatctgttccagtatttcctcaaaggaaaaagacaaggaagaaaggcttaaaattatagaaccatgaagctagaggcagttacagtaataactttgcctgcatagacttcaaatccttgaatttattgccttaggttaagaacttttttatttccataaacttcctagaaaatatcagacataccatttctgttttatatgccagccttgtgatgaacattccagagcttactgccatacctgcaatattctaagtgtaatattcatctactgtgcgctgggccatcctctgtgctgtgtcactattatacattcaaagccattcctcagaagcctttgaagttatatggcaattttgtgtgtacttcttgtcactcatatatgaagtccttgaggacagaagttattttgcttattttcatgtttatcattttgtcttcaacctttcccaagaatttaccatagtgcttaatagttgatagttgataacattcaatatgtcctggtttgttttttgtcaactgatcataggtagaattttctataaagagtgaatctcagttaaagaaatgcctctattatatttgcctgtaggcaattctgtagggcattttcttgattaatataattgatgtaggagggcccagcccattttaggtagtggtaaccctggacaggcagcagagagctgaacaagccaggaggagcaagtcagaaagcagtccatctccatggcttctgcttgagttcctgcttccaggttcctgctctgacttctcttattgttcctgctatcccttggtgatagagtgtgatcagagaattgtaaattttaataaactctttcttcccaagtttcttttggtcatggtgttttatcatagcaatagaaaccctaactaagacaatagtatctattaaattgcaataaaatgactatttataaagatgatatcattcaaatataagaattatatcaagtatgtctctgttccttgattctcatccacttttacataccctacttgcattcccacacttttaaatagacactcctggtttctttgttcgtggaaggaaagaaatctgataaacctaaccatattgaaagtaattgactttgttatgtttcccctgagtgacctaatcacctctgtttatttgagctgccagtaattttttggttggattttataactttcattaaggagttgaccttagggaagtttgaaggttaatcatatacctggcctctctgtattccaaccgttgaaaacaaatacaaagggctatgggactgttacagcattctcaatggaaccccaacaggctcctaaaaaataatgtccctgctaggctgcaatgtgagaacataactttaaaaagaagatgaagttggaactttctattacttccaagcatactgaaaaaaaaaactacccacagaaaacactggatatacagaatcaattcagtatgtatttcttcctaccatgccacccagatttcacaggaaaaggtcaacaatgatttctgttatggtttagatatctattatctcccaaggctcttgtgttaaggcttgctccccagggtagaactattagtagatgggcccaagagagtctttagataatggagagcatactctgcaggaaattttgggacttccaactcctttctattccttattttgatcctaaccatggggaaacattttgctctgccgcaaactccttgccattgttacactgccaccagaggcccaaagcagtagtcagacttgcagtgtcgtgacactgtgtcatttagaggaagctgttcctgtttaaaaaccaggatttctaaatcacagacccaaaaattatagaaacaatttgggagggatggaggtggtatttttcacacatctaaaccttggttcccatgactatggacatactcatttagaatagagttaaacctgggataatggcaccctttccttccagaaaaccctcactaaactcttgccacaagtatactgttaatgggctaattgacacataatccagcaactcctagagaatgtaaaaatcaaactaacactagtgggctattcatggctttgaggtggaggggattatactaggcatggtgcataaccctggcttctaattttaaacactaacaatgaggcagttactaggaaaacacattttatctatatagatgaagaatttgagtcttcagagttctttctttgccagagtcatacataactgaaatacaatattaatacctgcttttaaatttagaccctttctgttctatcaccaggttctcaattacaaatattatttaattgtcaaaaatgtaagatattaccatgaaataaagtaacataaaactagaaaaaatcagagacttctatttagagagtttgcaatggattaggtttcttgcaagttgcttatgtgaactgagcaaaagcttgactctgcctcagctatgatttgtcttttgcagtaggaagcaagctcttatacatatacacacacatatgcacatgtccccactttaactcactgttcagattaagaaacatgggcatagtcaggccccaattctaggtcaccatttgagattgtagaacattcccattctttgagcccggtttcagttcattggagattaaggagtatgccccatacttcagttccaacatctggtctccatttgaggtttgaaaacacactgagacttcagcttccactccaggtcatccgaagaggccaagagtctgcagagaaaatagcctcacgtgcagtcttcactcaagtcctgatcctctctgcagctcttccttcttcataccaaacccaaggcaaatgtgacaagccatcatggtccttcactgttcctgcccctttgtgtcttgcctttttgtacctttttttctccataacacatcttcttccttttccttctccctaagaacacacaataccctattacagattttctatgactcagcctctagagagaggagactgttctgtgctatctgtgcatctcttttccagctactttcagtcatcctgtaaccaaagctctcacgtcctgactcccacttcttttctctacttccaccacccctccttctgtgtgtgtccttcttttctacttcctgtatagaaacctaatagtgttcactaatcctgctatgatttctgtctctttatttttttccactcacttcctcaataactaaggtacacagtactactggtgtccttttattcctcaaaataattggtacttaacaaatggctgttttgtagtcaaccaacactctttttatggtggatttgctactggacagaaactgtggttggaggcagtagttggtatgaaggagcggtctggggaaagcggtctggtgtctctgcagcaaactagtaagtgagggcacactattcctatggcacatgctaagtccacatgtagctgtatttacttagacctaagccatataaagaagagatgtctagtggagaaccagatgttaagatctcacttcagtcactactggagttgggtgtattggtgtgagcagaaatggaaggattaggcttatagtgggcatgatcaaagggagcataaaaaacagagaaataaaaaggaaagcacagaattctgtggaatgtggtgcagaccatgaaaaaaaaaaacccagaatcaaaagagaaggaactgcctatgggagaacagaaacagagagagagctgtaagacagtaagaggcaatgagaagaaagcctggaaactatgagggaagtcaaagaagtgagtgatgtggatggtcatagaaccacagtataaggaaaaaaatatgtcaggaattctaattgttccaaactgagaagaaagaaagtagagggaatgaatcaatgggatttttttaaagtcccagtcagtttctgagcattaaaataagggtttattcagatgaatgcccaattctgaaacatgaatgaaaggaaactaatgttggtaagccgtacatagacacgttttctgagtcaagttttgatattaaatatatacacatatatataaataatcaattatacttaagagactaatactttgtatcagtcaactacttgctttccttctctcttctgaaaatgctaaacaacaaaattccacacagaaatgcattgtcctacatataaaaaatatactaaccccttatcaatttatatgtaatatttctgaggacctaggaggattcccccctctggaaaggggcttctgaacaggatctagagttgaaagacatgctcccacctcttgtcatgttgtgcaggcttgttacttctatcaaggagcttttgggaacgtgtcaccatgcagtatattagctgtgctgcctgttctgcaaaaggccatttcttcccctgcacacatgaagcttcagcttggctgagtaggtaagtattgcatcattgctagggcctgtccttttcaggagtcccagtaagatattctttctatgtttctatgtttatttgttacagaataaactccttaacatttgaaagtaactgttgcatcttgaacccattgtagatgcttgtttcattattcagtgcttcaaaagtgaatctcccaggaaacatgccccagaatcacaacatagaaaggcatccctcactgctgtgcctaacaagcaggatgggagaggaagggagtttgttcatgcttcactgggaaacagaatcactttcacatattccagatcattaagcaaaggatggccagatatagcatttacctcttccaagagggggcagtgttgagcactgcagacatactgggagagggataagacccatggctaaactttcctttccacttttggaaaatcttgacacatgccaatttccaaacatacacatgcgtgcacacgcacacacatgcacacacacacacacacacacacacacacacacacacacacttgcacacacgcagtacttttttcctttcttactcaccatgatccctccagcatgatttcaattaattgccaccaacttgtgtatataagtgagggggagggccactaaacttcctctccatgggtgctgcacagataagaatatagcaaaattagaagggaaaattgactagatttttttctattggagaaattattaaatctaggaatgtacaaatggtcatgaattcccaaaataggtatgggtacatgaacagacatgaaaacgaacctcctcatgatctgtcagtgtcatcagaatatacagaacttatggaaccaatggaaagaaaacgctgaaattcctattcaaaacatctgattcttaaacaaactaaaataaagcaaaataatagcaaaaacagtagtttgtgcagtggcagtatcatagccaatgaggttcatcccgggcgagattattgctaattgaaaacttttcccaataccccgatgtaacaacttgcaatatagtcggcattggcaatttttaacagtctctatggaaactgcaaaaactattttaaaaagcaaaaacagtgatttcctttctattgagttaagtcagaattccataaactttgtacaaatttacagcttgaagaattgtcactcttagtgtactcctgtgagttcctactgagcattcactctgtcttatcccaggggactagggagaaactatccatctagtcacagtcctgaatatcaaccgggtatgctaacttccctatagtaactgtcattgttctattcttgatgataaatgatggggaagatttttattgtataatatgatggggttttcctccagctagtatatagtcatcattgctatctgcaaatacctaatgactgggatgggaagcaagcattgttggaaagcaacagcaatggctattgtttttcaaaacaaaggacaaaaggaaattattatctcagataaacatgaaacagtcagtgagtcagccatgcttgtgagcttacatttatgccagagtatccattttctcacattgcgatcaaagtcagagtcttttttttctttgtatttgagaacatccttgatgatacattattataagtatttcataatcctacctgtccagaatctaattaaatggagtcatggcatgcacatattggaatactatcagcaatagattatctgttacgctggtcttaaatcgcagaactgaattcccaacagtttgcttatgttctctcttgcttctactcctgcttctctcactgtgtgttctctattctttatcccctgctcttctcccctccctcccaggtagccctggccatgttgagtcttgtggccatgttcagtctacttctttctctctctctgctctggactcatccagatgcctctggctgttctgtctcccatatctacaataaaaccctccccctaaccatatcatggggcagtcatgtcatcagtttatacactcaccaaaattaccttatgttatcagcaataaacaaatcctcacagggtggcatttgaatgatggaacagatgttaggctccagaaaattgacaaatggcccataaataagctatgagatcttcattattaagtagcacacatttctgtttaaaattacttaaatgagctggagagatggctcagtaattaggagcctttgctactcctatggaggtccagactgagttcccatcatctacattgggtagctcactactacccgaaactctggctccaggggacctgatgctccctttgggcctccacgtgtacaaatgtgttcatagacataccagaaggccttctcacacatctcattgctaggactggacctcaggagcatctgtgagcaccacaatagtattttcatggttgacttgggcttaattacatcttcctcgattccctgaaaactgggagcaagttagccttatgcaagacttgaatcatataggggttaatgggatgctgtaatggatatgagttttattagaaagtaagatgtgggaataagaactgggaagtcttccagcagtctccatgacagtccattatcctgggatctagaaattctatgcagaaaacttctccattgggtttccttataaaatacaaacattaggaacaattattgtagtgatttttatgaaataaatgtctaggttttaacatccattattttcagttataaatttaacttagcttgatgtcttcctgtttggcatttttttttctacatacaaatgttaaggaaaagttgcagaggcaggcaggtaaaacatgacagccttcctcatgcagattgatgcttctttagggtggtcacacagggatagcaaacagcctgttggtgccccaccaaaagatcctggttagaaaagaggacagttaaatgccttagtgaaagcaagtgttttctcaggcagaacctaatgtgcaattcttactcttgtttgtaaagctgcttagtgttataaattatacattagcctcaatactgctgtcagcaccacctctgttatttgtttgccccagcagtaaatcatcccatttcaatattatgcacatctttatcaacacttcagtcttgaaattataaatctcaaccttgtataaataatacatgaaaatgtagatggtatctgcaaactgattttttattggccccttaatggtaatgaagtgtgacatttagttggatgagttcttcctaaaaatctagaaatggatccccagatattgtgaattcttctcctcagtcctgttatagagacaaatggcagcaatctgagggacaaagaccaacttgaagccaaaaggatagttttagagaaacagctttaaaagacactagggggttggtttgtgttttgggttttgtggatacatataacactctgtaggctggcaaggtttctcactagcaaactgaaattaaatgtgagatacttgggtcaattaataaatacagttgggagtgttttatccaacctgactacataagatataaaacttgctgaaaaatcctataaatttgatatatgttataaggtagagagctgtaattcttattttaattccgaactgtcctggagacccatctggtccttagttcatctttgatccagaagaacaacagtaaaacattgtagggcaagaaacaagaagccacacaatgagttcactgatggcagggtggtgtggcacctggcacatgcatggcctctacaagtctctggtaacatcgctctttattgaatgaaggtggaaagttaccatgctaaactctagagagcccccagcaccagtccggcaagggttcctgtctggtcactgataaggtgagagtttcctcttcactttctcaatgtaccgttaccataccatgttcctgcaccttgctccatcttccctaaccgtaatgagcatcatggccctgtcccaggatcttgtcatccttctctacagtccctctttgtttctttcttcctcaatgtcatcaggttagcgtgagatcagggacctttcagacagattgcctgttgtgacactttgcttatagtaccactctgtgagtatgtcacatcttcacttactaaaaattaggcgatgtggtcataaaaataataaaaatgtctccttaggatagcattacttcctgggatggtagactccggattaggccatcttaactggtttatctttttaatgctctaaaaaagtctctatgggggtgctgatatgggggtctatgcctaaattcccagaatttggaaggtggaagcagcctcagctatctagcaaattggaagccagtttgatctacataataccctgtgtcaaaaaaaaaaaaaagtggaaacctataatcttttctttctgtactagagccaagtcccttttgggattaaatagacatagatagatagatagatagatagatagatagatagatagatagatagatagatagatagatagataggtagatagatagaatcacatatacatcccaataggtactatgttgttttttatattgcctagaatttttaaatttaaaattcttagctattttattgccataatactttctctatttcatgtttttactatccccaagatttttcttaaaataaagtgattgtttaaagtactctattaattctaacagttctgcttcctgatggtttatttgttggtttaccttcatattttccatgttagtttgttttacccaccaaatgagtaatatgatcttcattttgtctctgcatttagtgtttggctttttttttccattgaggacaataaggacacagagaagatctaagttctagctacaggaggtcctgaacagaggggaaggttccctgtgtgctcacagtgttatactggatgccttcccctttgttgaggggacagtgtgctccccctagaagccccattatcctcatgattcctgtctttggattcccacgatccttccttgctctttcagcagttagaagtcagaatgtagaagtaagaaggtagcggatcacaaatgagctccccagccaatccagcaaatatgcctctgttcctggtcaggcttttctaggcagcatccactctgactgcatgatacagtctgctcttcagaacattgtacaattacacagcatggcctatttgacccacacaatatagcctgttagaaattatgccgactgtgcccagtttgttaatgaggaaacagacttagaaatgttgactatccaaggaactcacagctagtgatgttgtagagaaaatatttcaacatatgcagcaaataatggtaggtagggactaaggactacagagctcctgaaccaaaaccagaaaaccttgtgtgctacataggacctgagggggactccaatttcttatctgccgccactctaagtctgtttataatctaaaccttagtcctgcttttttttttcttccttcctttctttcttttttccataacatgcacatatccttattcttttgggacttttcaaccagcaagcctctttgttttgatatgaatatatccattaatacatgattgtgtactagaaaatatatcaatgaattaacccttgggtttgaaaaaaattctaatatggcctcagtgctcaaaaaattattcactctgcttttaagatagctatgtagtatggttggcaataaaagagaatgaaacagctgtgtcaatgagaaggaacttatgattgaaaaccttgtcatccaatttaagcaacacgaagttcgactttagcagccatatcaaacatcagacttctgaagacttctttgtcagagaaaaaaataacaaacctgtgatgaaacacggttgcattgtattattgtgatttgtatcctgtttctttgctcatttgcctctgaaagaagaagtcaagtcagcagtccctccttggcagtgctgagaagagtggcttaaaaattccattacctttcctgaaaaaagaagcttgatctaaatccttagctactcttcattagaaattattgttcataacactagtaatgatcaccactggatgttgaaaaagctacttagatgtatatctggaatctagggctggaatcttcatctcttcgttacacctgtgctatctaatatttattgccgtaaataataggagcagcaaaattacattatatttcattaattgtagataacttaataagtgtttagctcctatcagaatattatagaagaaatactaccatgtctagattatacctgataacatcataatcatgatagttgatggggtaagaaaatatactgttaaggaaagtgattaggcagctcagcttgtaaatgatcacatgattttaatcaaaactcaagcattagtcaactttttcagaatccccatggctatgccacactgtcttgtatgcctagcaatgctcagaacaactataccattggtattttctgtgctgtatcgatccatcaatcagagatcttggccataagatatgtgagttttaagattcataaataccttggagtgcttcttctttgcctcccaactcaactcaacagatattgacagaaaagtcacagtatatgtgagagtttctgaactttctcccagttttactggttgaatatgacagagttttgttttgagatctcattaaaacattataaattataaatatttactttagcataatcttctaggtcattcattttgctacctttccaaaaactggagctaaaatacataatcatagcattcttatggaaggctggatttataatttcattgatatttttaatacttatttttgatgtgtatggttattgttcctgtgtgtatttctgtgtactgtatgtgtacagtgtccatggagaccagaagaaggtgtcagattccctggacctggagttacagctggttgtgagccaccatgtgggcagtgataactgaacctagttatctgaaagagcagccactgctctatctgaaagagcagccactgctctttcatcactgagccatgtccctatccctcactgatatttgatttgaaaacttggacttttgtaatcttaaaataacaaagtcaagggttataggccataaatcaataagagataataaaataggtcataaaaactacccaatatcaaaaaaaaaaactaataaaatagaactaagggaacctggaacaaagtgtacctaaggagttgaaaaaagttatagacctatacccaaccatacaaataatggaattaaatgtaaaccaaagaaactttgaaaacacaagtcataactacatatttccaaaagaaacatacttcaaatataaagataaaaatgattaaaataaaaaggtggcattatcatgctgacataataaagccagagtggctatagtaacaaagatttcttagacataacaccaaaaatgcactctataaaaaacagaatgatgaatgagactagattcaggaaattatttcagccaccctgttcttcttaatgctttaagacagaccagattgaattccaggttcatttaacatttctattcaagaaactagaatttatgtattgcctagtgatcctttcttcttcttgctcttcttcgatgtagcaattaataactagtatttgtactaaagttcaagctacggatagatttttctatgtgtcaacttaattttgtattatctttctaaataaaactgcttccttcccattggagtaaactgttgctctgagagtttcagttccttgcccagaatggcactgctagaaagtgatggtggctggcatcagggcacattcccaaaccacagacctggttgatttccactgtctcactttgtctctctataaagactggtgaattgattccttatttttaacggtaatcttatttaagccagttcttgccagaaaagattaatgagggaattaactctttcatcacaccaagatagtacttagtaaaccttcatctgtgcaatcgatcatggctaacatgcatgtttgcaagtattcccagtgggagaaatccatgaccaactagcttcttcatcttgatgagatataaattctgctttagcctccagtgacactctgcccttctgcactcaggctactgtcaataaatgtaattcccaaagtgactacccactgcccatagtgtaactcctttgtccagtgaggtctagcttgctatttctccattgctgtgtaaagagtggttcacttcagggagcctacttttgaattcagtactcttggcacttggcccagttctataacagccatataccccagaggcaaagtaatggaattctggcaatctggatgtcccttttatttctcttttacatgtgtttacatgtttgtgactgtcctctgagaatggctcaaaacagaaagaataaaatcctctcaccattctctcgaaacatcaaaaccatatggacctccttatcggtctctgtcaccatattgcactgtacacacagttaagccattcagacacctcatacaacatatttaatggtgttacatttataccagtgtatttattgcaaataatactaagaaagataaatgaataaaaatgaatcactcatcaaacaattatcatgaaggaaacagactctttacagaattatctagagaaatgcaaattctattttcttgctagtaatagtcctaggccccttgcttggaaaataaattcaatatcatgttttcactttatcctgagacatataaatggagcaagaaatttgagcagcagaggaagcaaactactttatgtcaagtgctggatagagttcagtgtctaacactaacacccttttaccctttgtgattgctttatctctggcactaacctccattctctcttagttcttttgtttgtttgtttgtttgtttgtttgttttgttttgttttttgatgtatcttagtcctggaacaattctgacaacaatctccagagctaaaagagttcaaaaaattttaattgtctagctacctatgctacttgttggctttttgacatgagctaaacatgtttacagaggctgagatgcagttgcttcccacatgaaaaaaaggttattatctatgagtccatttgagacctacaggagaccatacaagatataaaatcatgggcagttgtttaatattagatattgcaatgaaattaaaatttttccagatggaatgatgaaaagtttccagttatagattacccaattctctcactttgaaatgccacaaagagacagccaccctgtcagacaaatatggattgttcttccctgccatgttgatcccctttttaacttggagttattttggtgtccccagcagatcaacagaagcaggaataaatgcagagaactctcagtgatcatagatatagttaatatatagatggcaaagatgaattagatatagcaaccttcccaacaatacaaacagtgataaagacaaaagaatccctttgagcttccttttcaaaaacagagattgtgaaagtgcctgtgggaaacacaaggcagatatagataatcaatacttagatgctcttttgctagctacatgaaagacaccattccctgcttataattaattccaacaaccgtgttataaaatgaaaaaatagagcctcttggactcaattttctctgactagttttatttattctgaaataactcatctgtatttcatatgtttctgaagctctcccattttccggcagcaccttgatactatggaaccatcccatacataagaaatctttgttgcagaccagttaaaagtacaggccagtttagatccaatgagccacttggtacctgtgatgttcacaataatattttctgatgcctggggctgtgatagtagagttgatacacagagcattttgaatagccccatgccggggatgcagcctctgtgaatgctacatagatttaactatcagagtgaagactgggaaaaaggtatccatctattctctggattctcttgtttgttcaggggctatgatttcctgtgggagaggatcaagtcctgggtgaatgtgtgttgttgacataaacacagctgtgtcaagggccccaatgcctctgacaaggacaaagccttcccctgcttaagatcagggaaatgacataaaatgtcaactccagcttcctcctcccagatgtgtacagcccaagactactcccctacagaaacctcaccaccaccaaaatcagttaacctgtccttgtttggctatgtgtaataaactccccttatccttcagctgtgcacagtaaatctgcctccccagtttggacatataaatgtgctgagcttccaccagagagtgcatgtcccagccaatcccagccttttccatatgtatgtctatatgtctttcctttcttcatcttgtttccccaatcaggtcaatccctaaagccatacagagcttggagatttcctattgtgaagattttcaaccatgatttttttttctagaggaaaggaagagtgtattggtgtacaacacatagcctccggggttggcaatgcagccatctctgttgctgttgaggatgagtgatgactatttacataagcctgctttgttcaaacaggagtgcagtggcctgacagtagttataatttttaagacagctgtgactttcccctctgttttaattattgtgttcttctctgtgttccacatcagatactatcttcttgatggcaaagaaacatgtaaggaatgcatgagcaaatgatttcggagatattgagtatacttgttttctagtcttctgtttagaaataaatttccaaattagtcctgtaatattctagaaacatttaaatctggggggattctctcatgtacccttttctaggacttcctgccttctctctagtttcatcatttctgctatagttcatcatccctccaaaccaaacactcccctctttattcttgccatcttttcttgttgaaatgcatttctatcccttttgcttacctgaatttttgatacacacactccagaaatcatttttatttcctatagcagctagtgtctaaaccacttagccatcagctaacatacactgttctatacctttgtagctgtctttttataagaaatatacttagccagactgtaaacccctagccataagcaggccttattcttccacaaacagctttataccttattcttggaacatttcaaaataatatttaatgtaattccttgctccaaactaccttaaacatacttcacagcaaaatgaaacgcagcactctggaggtgaatatcgccacactggaaacagcagcctgcgagtacattggggaagttcaagtgctgcgatatagcgggacattgccaatagagcttcacgtgcatcagttcctgttgactttgtacttttatttttattgatttggcatgtcggttttcagtcggttttccttgacttctactttggagagagggcattggcataagagcatttaacttttagtttcatgcactcacaaaaatgccactccagcattgtttatctttacaaaaggcatttcaaaacaaagcaagagacagctacagaatgtgaatgccggccatctgttctgatgaaatgtaaggaaggcgtggatgggaatgaggtgtgatatgcacaactctctctctctctctctctctctctctctctctctctctctctctctctctctctctcctcttcaagcttttcaggaacatggtgctaatgactgtagtgtggaaatcacccatctttacagtgtgcagcaatatgcttgaggtgctgattatcacagtatagccaaaccccaggctgtccaaaggttgtaaatgagctagactctggaaggccatataagctctgttaaatattttaaattctggcaaattagtctataagagccatgtgacagtggagcttgttctggaaactagggtggcctttgactctggaaacctcctctacctcagtggctgagagcatctggtgctatgcatgttccttaatctgaattcatatattaaaatcttttgtatcacttcagcatgtaaatcaggcaagtggttaatgtgccagcacctgtgggaagctagatttttttactcattacctgatgaacaaaacatctgcctgtgactgcatctccacaagggagaataatatctcactgggatggacatcattgacagcaaaacacttgaggacagtgagggctgctcagagtcaccagctagcacagagccatccactacagctacctctatttcagggaaggtcgccactctgctcttcttatattttggttcccagagagccacagtccatcagtgtctatgaaaatacttttaaaacatcacccctcttttctagacatggagttcctaatcttgtttctggcttacttactgtattctagtgctttccctgcctcgtcttgccaatcatccagaggcatcatgtagagctgacatctgcatagtcagactccacccctcttttgcactcatttgctcattcactcctcatcagcttaggtagatgttctcagtacctgctgcatgctatcacgtgtgctgagagaacaagacaccctccaagtgcccaaggacttttaatctagtcaagaatgaaggaacaaatgagcaaacagatacctcaaaccaggatatggtaagactatggaggaaacatggaaagataaaggagaggagcagatgaggtgattaaaaagtttttgcatatcagatgagaaaggtgagatataaaggtgacaaataattggcctccattcacatatttagtgagtggctgagccacattcagaacagaaatgcctacctcaagagcccatgctctttagcactgtgccacgttgtgttcttgaccctatgtcataccaaactagagagctaggagcatttccttaggagggcccacaatgcccttagcatcactgcaatccctgcaagaattaacgctattagaaggaggaggacgaggagaaggaggagaagaggaggaggaggaggaggaggaagtggaggaggaggaagagaagaagaagaagaagaagaagaagaagaagaagaagaagaagaagaagaagaagaagaagaagaagaagaagaagacatccaagaggatctgtaataccaatgtgtggtcctaacaattgaaaacaaaactaaccaacaaccaaggcttagctgaaaaataccaagatgcccagtatagttgactattttttaaaattcaatcagcaagatttttgagcatctacctaaaatttcttgtgaaattattctgtatgacttcaaattgttaatttcaggagattcttaaacccataaactaatcatcaatttttattcaataaaatattttctcagtcactgttcccttagatgtggcaaatccttaaacttactttaacaaagtcagccttgtgtctatttcaatagaattcgtttctaaacaagtattaagagcattaactataccacagtgcctattaataacattccagggacaaaatgaataacatgcccttataatataagacatatggaaatgctggcagtccgtatgatcagtggaggtgtagcatatctgcaaacacaaggcaagctaactgtgccatcctctgtaacttgggctcatgagcaatgctattagataaagtagaaattagatttcatggaaactggtttagaatgaaaggataataggataccttaccataaccaagaatatatagtgattttagatctatcacaaaggcccttgcagtttttaaaagtactgtcataaaaatcacataataaaaaactaatccagacccctgaacatggatgtcaataaggaggcctctgcactctagcgggcccctgatggtggattagtatttttccctggtgtaagaagggactttgagagcccatcccacctaaagggatgcacttttgccctggacacatgggggagggcctaggcccagcccaggaagatgtggtggactttgtggagcccctgtggagggccctaccctgcctggggagtggagggtggatgggatgaggggtaagtgggggggggcgtaggaggggtgtgggtgtggagagggagagctagagggagaagggattgacatgtgaaacaagcttattcctaatttgaactaataaaaatataaaaactaataaaaatataaaaacaaaattgtaacaaccgtataatagcaacaaaagagtacaaagtaacctctctcattgtttttcctttttttgttttgttttgttgttgttgttgttgttgttcatgattttttcttctgtgggatgtctattgagcttcacccctaagaagaccagatcgtgtcagtgaaatattttgtttttgtttatcttgtcatttgtgggatgtcttaccaagcttcatacctaagaccagatcatgtcactggaatactttgttcattagcttgtcctttgtgtgaggtccatcaagcttcatcactaagaagaccagaccatgtcagtgaaacattttgtttgtttgttatctagttatttgaggggtgtctatcagcttcacccctaagaagaccatattatatcagtggaatacctttaaactaaagatgagaaatctgcttagagaattggtcacaattagcagacggatagctctgaagaaacttaaatagaccaatgctcataatctctgggtctatagaagaaatggcagttcaacagtcaacattcactgagggaaacgcaagccattaaaaaatccatttctaattccttgaaagaaaggaaaggccatatgtagttttaagtgatttgctatgtgtcatagcatgggtttgaaatagtaacaagttttaattcaaggcttctaatttatttcctccattcgtccatataaaacagtatttttatagtatccaaaataaagcattgagaaggcaatattaaccacaggatgaaatataaggaaaataggaaggctgtgcttaatattttgtgaggccatcatttaaaatttaagtgactgtttcataacagagcacacattaatgaaagaaggaacatttctctttaaaggtataaaccttctcaagagttagctacttacagtagatattttggtgctagaaatatttttataaatccatgtccttgaggaaccagatcaagaagagagaaggaaataagcacatcagagatgaattacaagataaaatggtcatttataatgagtggtaatgagaacaatgatgtgtgggcttctacaaggagctttttagaaagagaaggagtggaaaataaagaatgtactctatagacaaattgtcagcagcacggatgaaggacacacaccagcaagcagactggctgagacagaacattgtgtctgggctatgtaaagccttcagtgctaggctcttttttcttttgtacaataaattggccatcaaaggatcttgattgatcacatatgtaaatggcaaaggggtacttgggaaaaattaattcaataataaaatgcaatatggatttgaaatgaagatgactaaaggaaggtaatttagttgcagtaccaattcaggagtccagatgtgtggagaaagcagactagagagattgcagtgaactggcatgtgaggaactttgttggggtccaggtgggccctttctctttcgcttgctggcatggacttgatctaattacagatagccagtcagacacaagtaacttttttaaaccagccatacttttacatttcaaaaagtgatagttcttaatgctgttctaatagattgaatggtgccctttgcccccaaatgctcatacattaattgctgaaacccataaacatgacatcatttggtacactggcctttgcagaggtcagggaaataaaagtcttgagagacaacactcagattgtctagatgggtcctagatccactaaaacctgtccttataaaataggcataaagaggggaaggaaatacagtctaaggcaaaaatttgaataatggccacaagctaagaatgagcagtcattggaaacaaaaggcagcatagaacagactgtcctctaagtctctgtaagaactgggacactacccacaccttgagttaggacatttgactcctagaactgtgggagataacatatctcttgtgtgaatccattaattttgtggtaattgtatcgaagacctaggaaattgagattgctacagtgaagatcaattatcattggacacttttatcactaatggtatacaagtcttaataatttgcatgggactcacatttcctgtgatggttaatcttgactgttttcctcacttctttcctcccctgaaaaagtccgagcgagaactctgtatgaacacaggagtgcttaggtcacaagaaagaggccttgaacagcaaattcagtggcttctggagtgtctggacttgtaaatgtcttggagtcgcagtccgtgcactatgttcatgagccagagtcaggtctagccttagagattttgcaaggaagagttaggaaacatgattgaaatagcatttgcgtaacgagggcgtaatttgtccttagatggcatgtctgtacttgagaaggacctcatagcttcctgtgggccatgaggaaggtgttgtgactttgataagcaaataaaggtatcgtcagacttagagagagtactgaggactctgggcctccctagcccatattctttctcaagattggccattggagtcattgagtaggaaggaatgaaatcatttttgcttgagaacacagttctacatcacttctttccttgtgatctcacaggtttgtcttaatccattactcctggggttctctgtaacatttgaaaagtcttcttatcccagaaacatacatattatgtatagttcatagtctccattataaacttgtgtcccaattactcagtattaagagatggaactgttgaatacccggcctctcgatccacgtgtacaattctctgacagccctactgagacagaggatgggtggtgcatatttgtctaagagatgccttctgtctgattaaataaccctttaatgaattgaacaccaacacttaaatagctaaagttgaagaaacaccattaattttaataacatcacaataaaatgtggtcacagtacaatataatatggtaagttaacaaaacatgtcttccaagtgatccaacacatgctactgaagtttctttgttggtgaaggccaatgttcagaaggctgttttcaaatttcacacatttccacacaccagctgcttgaccggggtaaagtcattttacctctgagcttttacttcctcaactataaattagaatttattatctccacttatcagagctgttacaaggaggaaataacataacaggtgaaagaatttaggacctacaggtgtgcaatttaaaaaaaaaaaaaaaggtttgttgattcttcaactttgtcaggcccaaacatggctattcgctgttgcatgttcaccaaagaatttgtatcggggagacgaggtttcactattgacattctgaatttactggatatttaataatcttggcataatttaaagtgaatactttgtgtggttttaaatggggaatccatttcagaacattaactccccaagagtagtcacagatagtgagtcagagcaatcaacacaatcaggaaacacacctccgtatttccttcctaatgcatgggtcttcactcgatcatctgcacatattcactagggtgttagcttggtgtttttgtaggactccaaactcctgtctctgactttttcacctgctcttggaacccctttactcctactgtgttgcctcacccagccttgatatgagggtttgtgcctggtcctattgcatcttgttacgctgtgtttagttgctatccctggggaggcctgatcttttctgaagggaaatggaggatgagtgatcggaagctggatcggtgagaagagtgaacagttgggatgtgctgaaaacaaagaacaagttaaaataaatgcttctgccagtaagagagatactcagcagttaagagcttcagaggacctggacttggttcacagcacccacatggtggaccaaaaccatcagtagctctagttgtagggacctgacactctcagctgccctctgtggtcaccaggagtggacgtacacacatccaggaaaacacagatataaaataaaaataataaatttttaaaagaatgtctctgtggtatagaaaattatgatacattatcagccaaaaacccaaatcatagaagtctcagaaagaaaaatatcttcctggtagcctaagcttgtaatcccgtgaaataaaactgaagaacacttacagtgaactgattttgttgttatcctgtgtgctgaatgttgagatcaggtcactgtgttaataacatgagtgtttgaaagactatgggtcctttttcaggagttgggctttaccattttattcagcactgtttccactttggccttttagggaaccatcacaccgttacagcaatttttaattcatctgtgaaactaacaaagaggactctttacaactgtcctatgtaaagtatcactgatgaaaattcctcataaatatatattcctaacaattataaaagatccactttattagtcaaagacctttaaatctaatctctgccttatagatgacatttgacacggagattctataattattggaagcacataaaaggaaacagaatatttaaaaggcctgagaattatgctctcgtgccacttgcaaatccattagactaagtcctaatactgtagtttttagaccccactatttaaaagcctcaataattttaaaacataaaattttgactaaaaacaaaaacaactttccccagatgaaaacagaaaaataaaggaaaactaacttagctgacctccctctccccttcaaacctttcatgaagtctgagaaggacagattcccaccctgtattactgagaattcccagatggaagtttgtaaaagaattcagccatgtccctagcggaaattctcatggagctacataggatgagaatctggtttataaacaataacattcatttctttaggacttgatctttgccctccatgaaaccccagatgttaagtgaggaaagatactcttggggctcctttaactttgtctcccaggttctcaagaactgagtaggccactcagaaactgattttatttccatcagtgggtgtaactatgtttgtaaaattgcttcatcttttttttatccagttttcaatatggtcagagccaggacacataggaaaaatcaaattttaagcagaagcctaatatcattttgcaagtgtggctctaagcacaaaaagttgcatatgcttgttgtaaaacatttaaaacaaatacaaaatgaataaatgatgatccataaagatagccagtagagttttctgacgaataattcacatatttccgcttctagagaaaagattttaaacaaatagatcaaattatcaggtactaattggaataaatttgaaaccttaacttataattcactgtatcattttctctatacaaaagagaaggaattttttagattcatttttattagaaacaatcttgttttacatgtcaatcccagttccctctccccccctcctcccctgccccccacaggtcccctatcccatctcttttcttctcccaggggagggtgaggcctgcagtgggggatctttaaagtctgtcacatcatttgagcagggcctaggcccttccccctgtgtctaggctaagagagtatccctctatgtggaatgagctcccaaagtccattcatacaatagggataaatgctgatccactaccagaggccccatagactttccagaccccttaactttagacacgcatattcatggggtctggatcagtcccatgctggtttcctagctatcagtctgggatccatgagctcccccttgttcaggtcagctgtttgtgcatttctccagcctggtcttgacccctttgctcatcacttctcaaggggggatatttttaatgtgactcacctgataaggcagatttcaggtgatgagaaatgaaagtaggaatcaaagaagctcaaaatcatatctggccatgctaacttctgtcagaaagccaaaactggcaagaaagcatgtgagaagtcaccctgtaggtggcacccagagcagtgtggaccagatgcaaagagaggggcacctgacatccacagctgtggaaaccttcatactcttcccctgcttcttgacttggttgtcaagacacctataaccctctagtctaggagagagaacagacatccattacagagtgtgatggctgtccctaagtaatcactgtgtgctaagattctaatctaaggactatacttacacatctgatctcatcttcacatggacccagagaacaggactactgttgtgggctgttagcagatggtaaaataagtaacttgctttttttggttctgttttgttttttgagatttatctatttttatttcttgtgtgggtgttttgcctgcatgtctgtctgtacaatatgtgtatgcagtgttcacagaggccagaagatggcatcagaccccttagaactggaattaaaaatgactgaaagccttcatgtggctgctgggaatggaatcctggttcctatgaaaaatgtagtcagtgctctttacaccccagctccaagtaactgcttacacaactaacaaatgtgtatgatgtcaacttttactctgtagacacataaaccaaagtcactacaatcaccatactgatcagctgagaaaacagccaaggaaatgccagtcaacacagtctaataaatggtatgtctgaagttttgggtatgaaatttcagtttaatcaatgaagtcaaaattagtgctttatcttttggctataactccacctcactgagctcttgaattctagtcctttcatgggccatatgccttctgagcttcatcacaggctccaactacagtatggatggcttatttggggagaggtgaaaactgcttcaactatcttaggctcatttgcccatatgccttaagaatttcaacccactcagtgattcttttccaacctgcctgaatgtcttttttcaaacaggtgtagtggctcaaaggtataatgccagtgcttgtcatgccaggataggaggataaccatgggtccctaggctacagaatgaaacactgttaaaagggaaacaaaaagtcttttggcactgaagaaccatggcctgaatatgagttcacacattctatctagcatctgtttgcttcccatctgagctgaatggtactttggttggaggaagcatttaaaactagaaaacttaggcacttttagccatccctctactcctctcttccagtgctctagacatttctacatgtttgtctcaaagtattcctccttgctcaagttcctccttgctcaagatcacactactggtttgttgttgttgttgttacagtagatgtgtgagcacagaggcaatctggtaaagtcattacaatcaacttaaaaaccaagtttggttaagtgactgaatcctttgtgggaaacttgatgggggtggtcatgtgtgtaaaagagtcatggaaatatttatagtactttttaaagggagagttatgtccaaaaagcagctagtgaaaaaaaattacctataaactttacaagaatttttctgcttttgttagtttcccatgcaaaaaaaaaaaaatagacataaattttcagattttatatgggaaggaattacagtttgaactgaagctacaaagccaagaatatgaataatctgaaagcaagagttctcattcatgaaaaaagtgatttgtacaaacacacatattgatagtatgagatcataagttaggccatcgagtaaaaaagaaaagaagcaataactaggttctaagacctatgtaaataataatctcttttctgtgagcttcagtttcctcatcctttaaactaagccatgtgaacttccttatctcagcttgcccttcggagtggggagtggctgactacctttgtattgtccacatggaaggcttcctgctgtactaatagtacatctcttgggggcaagctccaattaatgaagagccaattacaaacctgtgtgttgctatgaatggactgagaacatttacttaatagtgaccaagtgtcaaaaataaatgattaaagcactacttgtagttccttttacatggaagatgtgtttccatagagccagcctaagtaagaaaatgacttacaatatttgtattaatgacttatacaaatggaagggtttctatctatgcaattgtaatacacgcatgtcagtgcagattgttttattttcatattaaatataaaattaggtagccaaaatgaggccatggttctaagcggtgtacctagtaaactaaaaggatgggtagaaggtaccgacaaaagaaacctcatcactgtctctgcataggaacacagaggagacttatctaaaatgtagttgatcatgagaatttaagacaaagagaacaagtctttaatagtttgggccaaactaaattaaaacagagaatatttgttagtatcttggaggatggccatcaattcaaagcagccatattgtaaaataaataaagtttaggaacatatatgtatgtgttcctaatatatatatatatatatatatatatatatatatatagagagagagagagagagagatgatagatatagatatatatgttcctaaactttgccaatttatgtaattatattttattatgtaattatattttaatacaatataattatgtaattatattttaatctcaaaaaataaaagaaataattttaaaataaaaacttttcatgattaaaaaaaatgtgtaaattgatgaagcctgcataagggctaatgaccacatgagcataaataaagatttacagtcagtcagtggctactgagacagggagaatcagttttctccaaaaatgagcttcctaataggttatccagtctcaagtggccagctctaaaaacatgtacatatgagcaacacttaaatggactcagtaggttatatacatgtgtgtaaatcaatagttatatattacatatattaaattatatataaatataagtagtagatgagatcatggatttgagaaggggggatcatgagaacatgggtggagctggaaggaggtatgtaaataatgtgaaggcagtattcatttatgaaaatctcaaaaatatttgacggttaaattgatgtcaaatcaagttcttacactgtcaagttgggatgcattcttcaaagtaaacttgctctatttgccattcactctcgttaccatgccatacccaaagcagtgttgccacatacatgctttagcatttgtgaggtgaataagtgaatgttgggtaatagtggaaattaaggtccagtttgcaaataggatgaatgaatgaagccagtagtcagcacaagccaacagctggaacatatgatctagcacagagaggaggagcaggaaagaggaaaagatcaagagcagaaaaagttgtccagtgccaaatggtcagccctttaaacatacatgcaagtaatatgatatggactgcacaggtttcatatgtatatgcacatatacatacaggcaggaaataacaactagtcgacaaagaggccatgaatttgaagaggcaaatttagagagagtgaagaggcaaatggaagggtttgattggaggaataggaagaaaaaacctttcaattaaattgtaattttaaaacttttaaagaaaggaagaaagaaagaaagaaagaaagaaagaaagaaagaaagaaagaaagaaagaaagaaagaaagaaaaagacatttagtgctggaggagagagttgggaatgtgacatctggaagcatctgggaatgagaaaaatgctcctggccccaactttgatgcattctgtgaactccttctgagaatctgactatttcttattgacattttctctcactctttaagggacataagaaattcgtgaaacaaagagtaaatgaacatttcttctttacggctgaaaatcaagaagacctgtcaaaagatacataggttttaagtatttccagtttctcttcagaatccctgctagagtaaacattatgcattcagccgttatttagaaagtgccactttctgacatgtaatatagtagacgcgggtaaattttccatatgttagtggagtaatttgaggcataatctatgaaaagcaattggaaagctgtgaaaaatttagaaccactttgttttcagcgttgctaatgcctcctcgcctcttgttcatttctctgccctttgccatctggtcttcatcatatgtgctttctgcagactacctttcttaagattgcacatggctgcttcataccaattggtccgtgttttttagaacttgtgttgttgtgcttgatattattgatattgttaaaaactgtcacttcccctggtgctatggttagaatatgtttgtgcactctgacacttttgttaaattttgattgcttttgggtgatggttcaatggggttgggaaggggacatcatgggagtgtttgggtcatgaagacagaactgctttaactgacttaggcttttcaaatgagagtgacctcacacttccgtatgactgaactatatacattgagaaggaattgttaggagagagagcccagtcttggctttcttttgcttcctcacttaccatgtgatctctacctaatgaggtcttcaccaaaagccaaacagaatcagccactcaatctgaaactttctggcctttctgacctccaaaactgggagcctaaataaaccacttttctttatgaattaccaatctcaggttccattttcacaaccaaaacttcactaagacacctgatccaaaagtttgtaatttgaacttggaaccacgggtatgtgaacataaatccaccgtttgttatgaacctgacctaactactcaaactaaatcattctctccaatgtaccataagctgaatataacttcactcagtactcttcctagacagaagatttcatgaggagaaggcctgatatctggaaaataggtaaatattagaataaacaagaaattgttattttggtctctccttctctccagccacactgctactgacttgctgtcagttctcctcatttcttatctgaattattacagtagtcatctcatctatactcctccttccagcctttcatggttccattctttactggacaataataccaaatataaattggttcactctttaaatgaaacaattaaatggtttagaacacagtgcactgtggaattaacagagaccagacacctaagcatgatgtaactcaatctcatgcctgcagcctcattttacacaaatctctcctcacccttctctttggccacattgaatgatgtcctgcagtgatcctgtactcacacagctccatgtatttacacataatccttgctctacttggaaaaatattttcctataattagcctagaaattctcttcgcatcttcgagattaatatcactattacatcttttgaaattcttcctgaaacaaggacatctctctttctcctctgaagtgatgctatcctgtgatctatagttaagagataactactaattgtctaacctgtcttcccaattagagttcttcttaaagaggtactgtatctttggccttcagttcttttcatagggcctgaaacataggatacataatacatgtgtgttggtctagatagataagacatgaatttcggtgttttagtgaagaaaaaaattaaattgtatgatttgaatcagtcaatataaaagtgaaaaaagcagaattaatgtgggcagattgaaaaatcaatgatgaaagcaatgtgaaacagcattaagtttacctaataaatatgtatacatgtttatttttctcatgatctgttgaggaaacatattttacattttgaaaagctaagaaaagtatatatgtatgtgtaagctctaaaacatggagaaatgattacatataaattacttggaacatgaagagtgaggtaaggccacaaggattgacatgaggttggctaatagactctgcagtgatcacctcctatacagctcactgacagatgagaaacagcagaggtcattccaggaaatagccctgtcttttggaatcacggaaatttagcctgctctgcagcaaggctctaggccaagccatggatcaactccaagtgaacaatatgaaagatatgtatcttgttatgcattttcatgatttttaatctcttctgaaagagtcctttgaatcaattcttgggttcttggctaagttcaagtaaagagtcccttgaaccatgctaaaaagagcagtgtttttaaatgcctcaaactgttacattttaacacagataactgaattttaattcttagacctcattatatttttacagagattcgtttcttttgtaacttcctggaattggaattataatttagcctcagtggccacagatcatttccagtttgaacttactcaaagatgtaggggtgagtactcattctataactctagttctctggagctcttatggtactgtggtcaaaactcaacttttattttctgaagccatggtcaaagaagagtgatgtgagaaaagataggaccatcgcagagtgaaataactagcttaaacaattaataatgaattgtgttaaattaggattaaaaggcggaattcatacttactagaactatagctgtatttgaggactcattaaaagatcttttgtctacctcacctatagtacaaacaacaatagagccattgtatttttttctcctttaccaaactaggcataaaacatgttttaattgttttctttccttctagacaagttacttaattttttatttaagatcaaattaaaaactccacaactaataatgaaaagaatacacaaaactattagcctctgtttgcaacacagaaaattatgattattattattatgatgatgatgatgatgatgatgatgatgatgatgatgattggtttttcaagacagcatttctctgtgtagctttagagcctgtcctggaactcactctgtagaccaggctagcctagaatttacagagatctgcctgcctctgcctcccgagtgctgggattaaaggcgtgtgccaccaacgcccagctgtcattctcgtatttaagaagagttatttacttttgttttatgggaatgagtgcttgcctgtgtgtgttttgttgccatttgtgtgcctgatgtccatggaggccagaagagggcattctaacccctacagctggagtcataaatgtttgtgagttactatgtggatgctgaaaacccaacccagaacttctgcaagagcagcaaatgccccctaatttctgagccatccctccaaccccaattcttgaattctttactgttttatgaatattgccctcaaaagatgtaaactatacagttcagtggggcaaatccagtctgactgtcaatttataatgttttattgaaacataattgcatattaatttatatattgtccgttaatgccttcacaacttaatgtcaaagttagtacttaccatgcattgtattgttcatgatctaaaacaaacaaaaaacttgttgatctctgcttttaacagtggatattaaggtaaacaaagtctgatatttagaatcaggaacacagagtactgagatggcaactttgacatagtttttatttttaaaaaatgtaaagaaatttaaattaaatttaattaaagaaagaaattggtcatgaatagtggatttaaatccaacagtaactataaaaatgacttagtttctctgcttgaaagtttaatgtgacaggtatttatgttcacagtaaagggaatcatttggctatctttatttagtctacccttaagtaagtaacatacattccctgatgcagtggaaatgacttgtgatctgtaactgatttcttagagaaaaatggagaatatgagctgttaccatcagagattatgatgactcagaggctctttctgggccctgtttaagtcatttgaaatggaaatgaatgattcatatgtgtgatggctctagcagaagtaagaacagagtcgtgattcatctatactaattggttcgtgtgctttgttcttgtggcagagagtggagaaatgcatttctggtaccttgcgctgtgtgttcttacacaggttcccctccagatttggatccagatagacagcaaggctaattcaattagcctcctactggctttactgtgaaaatgttcacatacgatatctgaaaattagaagtcattgatgggacatggtggcctcagtgtatagtcagctaatgactaaaggatgttgtgtacattcagctagtgattaaagtagattgtgtatattcagctaatgactaaaggattgttgtgtataggtgactatttgctcatatctgcagcaccatatgtgttaaaaaaaatttcaaaactgatggtctcctaaagttgaacacttttgtataaagtaacactttgtgaattgaattatatttttctatttatataagttgcacagcacatagttcaagaaaaaaatcctcaatttaagtaaaaattctaagagaaatataatttacctactagatccttttttgaataaggagagttataaaaaataaacagtaagtaaaattaaccctaagtaaaaaaataaaactacattgagtaaatacagattgcaagtataattgtcttagtctgtgttgctgctgtaatacactaccttagactaggtgtcttaaaaacaatagaaatccattgctcagatacttaagggcagagacctgtaagatcaagaagctaataagtttgtgcctgatgagctcttgtgttccacagttggcacctcttactacattgtcccttggtggaaaaggcagcacagcctaattcagcttcccggataagggcactcatctcacatgggaaggctcttcctggaagaccctaactattcatcctatcacatcatgttccaaaatgctgtttatgcttcaagcaaagagacaaaaacaaggctttctcattataatgaacactcatacaaagctaccatatttatctttttgcaaaatattttgtgcacgtttcggaaacccttagctgagaagaggaaaatataagcattttagcaacaacattatgtaatatatgcacataatctccttaataatttctgtcttttgtctttcattggtacactgctggtgttggaagtgagtgtaaatatatatatccagaaaaacagtggaaaggactgcaaagttcagatttatagtgatttccccaagagaaagcattttgtgctatatgttaatccagtgtcattcatggcttttttgtttttgtttttattttgttttgtttattgtttgtttgtttggctggttggtttttggttttttgagacagggtttctctttggagcctgtcctggcactcgctctgtagacaggctgggctcgaactcacagagatctgcctgcctctgcctcccaacatttatgttttatatacaaaaacagatctttttcatgtggtgtagaacaaatattcatactgaaattagagagtgcaaattactttcaaagaaggatcagctctgctttcaccctgatagtgaccctgaggcagtagctgtggttgagcagcagtaggcacaagggggacatggctggtctctgttcagcactgcagtcctaacacttaggactcagctcctaagctccagatggagctaaaggtgccctttcctcatttcttaatctagctcctgcacaaagaagtcttcccctcttgcttttcctcttctgcttctacctgtttaattctcgttcctcttgccctctatgctattagtctctataggaagccatccatgaatgcctccctttttctcattctctcgccattaaaaaataaagaaaactggaaaagcatagctatagaaaactgagtatcagtgaactcaaccctacaacattaaaatagacattccatgttgcattcctgaccctcaaggaaagaaagttgtcacactcaagaagatggatgctgtgtttctcactggttgtgggctcccaaataacacatgcatctagaccttaatcagaatttttttgatgttgattattatgatggttcaagggagcaggaaattgaaagaatcaaaggagaaatgagtttggatctttatctggcagatttgtaactgtagtccgcaccaaagcaattatttttacccacatctatgagatttaagcgtatatcactagatatgcatcacttagttatccttaaaacttcaagaaagctacactaaaactatctcaatatagtcatcttctctgtgcttagggatccccagagaaaaaacaccttctgtttcccaggtgccaggaatttttttttcccttagtggcataagccctggctctacccaactgactgaaactgtcccttatcttgggtaatatttcttttgtctattgaagatggttattacagcttctctctgctctagcattcagatggccaagtgatttttgtcctcttagctctgcctcatttgtaactcagaatgtgttcctgtctttgggatgttcctcaagtatgtggcattggtcataaattaccaaaaagtaaacacagtggaatttgggcaatgctgtgcacagtgtccccagtaccttgggtttcccttgctgcagttatttcgcctggttactaagcttgtgttggccgtattttacttcctgtgtgtatgtttctcatctgttatacgctttaaagcttccccctaaggcttgagtcatgttttccacatctttaatttaaattaattaatcctgatggcttcctaggtaaattactcttctgttttgaaagctacctgacgcataccttggggattgagacatcattttaaactctcacctctttggtattaggaaaatgatatagaaggttttcagtataataccatacagtagcagagaagatacatctaactctttaatgatacagataatgagactgggtcttaaaataagtaaataaattgttacagggcacagatattcccaaaaccagagccaggaaggaagctaaggtcacctattgcttagttggcacatgaagactttttataaggcaccaaaacctttcagacctgctttgtacatttcaccaaagtcaagctggatgtgctcacatacctaggcttaaccatgagtttacaggaaatttgaattaggtgaacttactaactcatagttagtggatgaacagcagaagaaacaacctgtcattttcaaagctgtgtgtgagggagacaattcataatgaaaagacactatattcagctgcttgtattgaaactgcacatatgctacaaaatattagctttatctcaggtaaatgttgcattgattacaaacacaacctacagaatttactttatacgttatcttctgtcaggagtcaagtggttaccgactactgaggagagttgatgagacccattagttcattagggatgacaaaactttgatagctttctttattggctgaatatttttgaggagcagtcccacattaactattaatgaaccatcagtactttgatcgtatcttgtcagtaaccactagttaaacgtgtgcttttacaggtccacttaataaaggtgggcatgaataacttgagttcttgagtctctgtgtcttcatcatgggttctcgatggcctcttaaagatatttttgcacaaacccaatacttgcatttcttttccttctggtgctttgaatgtgacactccatgtcttctcaaaaaggggagttaatgtaagagtctgatgataatctgaatttctttcccatataaatgattttatgtctttgcttgggtacccaaaaggcttgttaatatttaaatcatacttttagctttgacactattagagtcttgtagttttagtaggatatgtgtaacacaaataataaaaacccaggcaccgatattggggttcaagcttcaaactgatgatcagagaagcaaaacaaccaagctagtagatcttacctctacctcagactgaaagggctgtcctctcctcaacgtggctggaaaataaatctctccaccaaacctcagactgcaatcctctctcaaccaagcctcagacttcaatcccagattgctgcctcttccttttatacctctcaaatcctgggattaaaggtgtgtgatcccaagtgctgagaccacccttgtggtctggatcaatttcatgtagctcagtgtggctttgaactaacagagatccatcctcttgtctcttgagtcctggaattaaaggtatgtgccaccactgcctggctctttggctagctagtatggctgctgggattaaaggtgtgacctgacttctatggcttatgactagatctgctttctgaaccctcaggcaagctttaataaatcgtagagaatatatcaccacaggtatgttttatcagtgtctgtccttggttgattttctaggcacaagatgcaatctttcaatgcacagcattgatcagacttcttcacagagttgtttccttgtttgttgtgttccatttttctgatttttctcctgatcctcctatcaaggctcctcttgacatcctaaaccatatgtaagggaattattgtttgcctcctattgtcttaaaatgcctttgtaggggcaaccctattctgctaactttatttaaatgaatgaattttattaattttttttagaagaaacgagccagaggagattttcttttcttttcctttattaaaattagcttaaattaattaggtttcgatgtggaatcttttctcaaacaaaacttgcttttgttctttctctccccacctcctccttccccaaactgcctcctcccatggtgttctcccactctcaacagctccctgtctcctttcatgtcacttgggaacctatcacccccatctcagcacctcttattctctctcatggtcccccatctagtttcatagactatgctcataacttcaaaacctgcctcttgcaacagtttctctgaatccactctgcacacttgcttcagtaccagccagtttagattctcctctcagcagtgtctctgcagtgtaaggtgagactctgtcttggtaagaggcgtaatggtttatttttaagaatttataatgctaggctgatctaggatcctcagaccttactaaatcgcaaatcctgaagcccctttatacctggattctgccttgtacacaacatggacttggctcaggttcggtttgttggttttcctctttatccatcttgccaaactcagccttttaatgaatgttttcatatcttttaatattattattattaaataggatatacagttgtcattttgctgtttgctttttgtgtggctcctgactcttttgttacatattctcccacctctgtcttctttaccatataagtatttccaagtgagaaattttacttcctctgtaatttctcatagggtaatttttaaaagttgtttgcttggggccaatgcgatggcttaaagagtgcggaggtgtttgtccccaggtctgacaaactaagtaggcttccatggacccacatagcatagaagggaagagctaatgcctggtcatctgacctccaatgtgtgctgtggcacatgcatatacatatacactatatgcaataataataataataataataataatatgattttgattattttagtagtttcctttgggcttatagttactgtcttaaagttatatgtggtatatacctgtccactttagatcactattatcttcaatattatacaaaacctttcttcctatttattctctgtcccttccctggtgcttttatagtcatacaaagcacatatttgatatgttatgtacacatcaacacgaattcacaattattgctttattaatctgtctttcaaacatgataattacaaatgtaatatactcatactttctttttgagatttattttatgacactgacatgatgcctattgcactaagaatctgcctgcaagattcattttatttttaattatgtgtatgtggtgggggtggtaagtgcccctgggtgcaggtgtctatggaggccagatctctggagctggagtgacagacagctttatgctacctgacatgtgtgcttggaatcaaactcaggacatcaagaacagcacacactcaacggctgagccatcttttttcagcctcctacttataccttcttgtatatttacctgcagcttatatttgctagtaggtagtatcaaaaataactatttgtttgtccttcatctggactcatcttactcatttgtgcctgaagaattcttttagtatggtttgcaaggctggcctacttccaatgaactgtcttattgttttattcatctaaatatgtcttggtttctttctcacctcaaaggacagtttcttccttacttactggacatacatttcttagttggtattattattatcattattttaacattttaaataccacagaccactgcattctatcactacagcttctgataggaaatcatctgagaagcattaaacatgagtcacttctctctcaatcccccaagattttcttggtctttagcttttagtagttaaattaggatgtccgaagtatgggtcactgaggactttatcctcattactgagttaagcttgtgttgcaatcactaacagtttcaggacgtttcttgtatatcttcatctattatcccccccctctctctctctcatcctttcatgactcacttttagaatagactgtattccctgactctccacaacactgttcagtcctctttggttttttttattattattattattattattattgtttctggttttttagtctcagcatcaataatgctaactgacctttctctgggtcgttgattgtatctgtgtaactaattgtatcttctgctgagaccccttggtggaaatttcactccagctatttcacatctcagctctagaacttatatttgacctataaaaaattgctatgttgatctctacttgttgagaaactatcctcatattttattttacacataatcttaatttagttcttttagcatagataaaatagatttaaatctttctctagtacctacatcttgacccctataggaagtattaactgccttcatattgatggtgtaccatgttttaattttctgggaataataactaatttattgaattagtacatttaaaataatatcacatggcagtcctaaaatttgactctcccacccaaccatggttaatacttctatttgttgttaatgtttacttcattgtcatagatggccaccatagtctttgatggttagcttagcattcagctggtggctggaacaaaagctaataccccagtgtcttccaaggagttctgtgtgcatttgaaggaccctcaacactctagggcagcatgaaaacctgtttaagctttcaattcctactttcatagagccataacattaagcaaaagtcaaagttgtgggttcttcctgagtagtcatacattggtaggtatgctcacattgctgtgaagaatggggtctccttacatacttcagtgacatactcgtgcttttaagtcctcctctggacatcttcaatgacatgctcatgcttttaagtcccctcctttggacatcttttcccaccttttcctttaacctttgaaaagttcctaatgtgcctccacagtcactagctcaggtggctgtggtgttagacaagctctgttgagccttttctagggatgcttgaaatcctgtctactggggaacattgagactcggggagtcctgagtaagtcacacacagacaatgctcagtatgttgtcagggcgccatcaagcaggtcaaatgatgacagttccatggaaatggagtttagaaggagtgctaacctgatctactttcctgtggctgtggggctgccttgactgtgggatggtggttttcagggttattaagaagcgggaaatgaagtggtgggaatctaagtgttttaaaggctagtcatccttgttccttgatcaattctctcctaagtgccagaagcctccacttcctcttaagagccctgaaaagtcccttttagctgtttttgtttgtttgtttgttttggttggttggttttattttgttttgcagtagcagcagcattgcttcaggaaggaaaggtccccagcatttgtgtctggcgtttccattcattcctatgtcttcctttatagcaagcacttaaacaacaatctttgctatactaaaatgaaattcatcagtaatatgacctacccaaacacacattttcaaaatgaacaatgtcattatctaactggaaagaaggaacggagttagacacatctatttgtgggctcactttgaactgggacattacaaatgaagtgactagagctgtgtttgtcagagactccagacccatctgtgggcatagatgttaatcctaaagttctccaaatgttaatactagtgaaacaatgtgcaatcttccctttgtttgcagcaggttcacaattctggataaaagagggcgggaatacttggatttttacttgttctatttttgtcttactgtaaaactgaatttgttcctggccacaaggcattgcagacaggtttttagactgtgtggatgcttagtagagccatcaaaaccagcatggaatggtcccgtccttcatgtccctgttccctgaacattaccctcctgagaccatctcctcacacctgtcccataaaaatctctccaaacacccgctagggggcagtactgctccttaagagcccgctttagatgagctgttggtcattgtttccattttctctggatttcaggttcaccaaattcaaagatgggtcttcagtcagtaaagcaatgaactgaacaaatgtaactataccatattcatagcttcctttactgtctgtatcctaccttttaggaaattttaaaacaatctctaaataatttgaggacatgtttatagatgtttaaatttatcttcctttttatttttaaataagtttaatttggtgtattcagatacacaaatatggaaactgatctgctcagataaacattgctttcctctgtcttaaaactctgggtgcttaaagaacagccctgacatctcctggggttggctggtgcaaaaatctgctcttagtaggtttccttttggtgtttaatccagactgcctccaaaaagccataattttatcctctggtaaagatcatgtgtctctacgaagaaatgcaggagtcaaggcctggtatactgaaccagtattgaaacccttgccattttctctgatacatcataattttatcaacttttatgatgaatatcatgacagaaatcctacttattcttagtgaaccatcaccaaaattctactgctctattctgatcatggctacttgtaaatatagctgtgaatgttgtaattatcatcgtctttatctgacctttgagatataatacctaactagtcagcattgcaaggtaatgtaagcaccacggctcctgtatttccttgtgatgaacctcagaccacagtctttccacgcttgcccttcctctgcagcacctgcttgctgtaactgttactctataggtagatcatatcatttatatcacaggtgatccttttatatctctacccaatcatttggtctcgggataaaaaaacagggaaaaggaaaaagaggaagggagggagagagggagtgagggagagagggagggagggtgggagagagggaggaagaaggaaggaaattctttttttattccacaagagggcaccatgacaattttcactttcaaaagaaactataataggccagctaaaaaaatttccaaaattggaatgttaaaataaatggacataattaaagccgcaataacttaaccaggacattgttcagatataactttaaaatccttatagggtgattcattttactaaggatatgttagtctcagagacacagtttttgcaaagcaaatgaataaataaataacaacgtgtatggccaatgggtaatagtctaacagtcacacatcgttaccaccccccaagcctcagtctaaacaagattttccttacttgttcagaaattatgttagaaaatctacaaaattttcctgaatgatggcagtttattagagatcacaacttccaaaagaattaagagataacaggatgccctacagggttcctgtccataagtattactgcaaaactgacatggaacacaaagaatactaaagctctggtgctcaggcatctattcattcattcacttattcatccatccgttcattcattaaatacggttattaagtatccactatgcactcctttcctgggttcttagaataatagtagtgtcagaaatactaggtttggccttagtggaactcgactagtagagagacataaaagatgggccaaacagtcaaatatgaacagacacattttgcaattgaaaatcaaacagaaagcaaattttaaaagaagttttatgggagaaagtattggggaacgtcttcagactccctcgtgagagacaccctgtgcaggtgatgagacaggagaaagactgcattgatgacaggaagatgagaagcatcgtgaagcctgagtttctgctccaggaacaccaaggaaacccccctccccccgtgtgtggagtggtatgtcctgggcacttaaagaaaacgcaggctgggccatgctaaaattttattcttaatgtagcttttaagcatttgacatggtccaaaacaatgatttgaaagggtgaagatgaagttagggaaaagaaggtataagaaactggagaaatgaactgaaacaccaatgcagtgactcagaggagaaaatggtgaccatgggtagaacataagcaacgtgaattaactgttttagaagtggcatctacaggccttgctgaggctttgcatagggggagagaattaatacacaagaaaaaaaatgacttgccagtttttagctagaacaacggggtaaatggttgtgctgttggcttagcctgagaatggggttgtgagccatcccaggtaagcatgtttcctctgagcgctcaagacacaagccccgtttataccacacaagtccctgtcctaatgtgcacagagatgtttcaaggtctgtagtgaagggcagggagccctttgccctttctgcatttcccactaaactctatgtgatgtggcttccagtgttcctctctgtggccagaggattagtacggcgttccccggaataactccaagctcttgtctctagggaatctggagtgtcagcagccccaggtctgagacaggcgacctcgacttttttccttctagctgtgtaacctggggaatgtcatttcacttgtggaagacttgaaggtctttctgaagacaatatcaatgattatgtgtaacccattttgtaaactgtaagcagttacataaatagatatttttgttctcatgttcatctcagctgccaccttcgtgacaaataccctatcattcattttgccctgctctcttcccttttcttcttgcctgcttcttctacctcctgtcctttctgccagataaatttgcttccctgcaaaaggctgattatttggagacatcatcactagccaatcagagctcaccattccttctggctggtaagccaatcagatgtaagcgccaggtctcctttcagtgttgctagggtttcaggtctacttctaaaagctggcttgcttgctgctggctcatccccaccccacccccaccccctgctccctacctctttcccttcccctcctcccttcttgggtttggtgcaattccaaatgcttaagccttccggaagtttgggttattaagaataagcaaggtttaactgtgtattttttcccttgagaaacagaggacagctattccatgttcgatttttaaagcatgtgttttagcagcttaatgtcccttggctccataaaacggaatttagttgtgtttaggggaacttttttggtgcagattgacttttatccagatgactagaacataaactggcattaaatttggcagtgacacgtcctatcacttgaacctcattgggcttaacagaatgagttctgagtatcttaacgcacttgcagttttagctgatgatggatgacaacatctgatagcatcacagttactatgctttctctcaaactttcagtgctgggattactggagaaagccactggtcagccgtgatggggactgtcactttattgctaagtggatatctctttgctcacatctggctcatctgtggacccacgggtcctctttaaaggctctctagctggcttgcgaagataccctaaacacaaaccagctctgccttgcaaaaacctaaaggcaatgccaaattgagtaggataacaacatcacacaagttacgtctttctcataacctttgctacatccttaaaacttgggcagtatgaggatttgcagtgtaaaatgaccaaagacaagtggcaaggagccagagttctgtcagaggcagcttacaaaagcttaatgattaacaaaggggtctctgccttggggctctgacctttagaactagccagcttgaagcttttggttctgttccttcaagtcacttgtatcaaggagaaaggtactcccaaaaggcattaccaaccgtccatccaaaaagaaaagaaaaaaaaaaagaaaaaaaaaggagaaagtaccagttctagggaatatgttctcagttaatgtgaacttaatcctaaagacagcattaattgctcaaataatattttggtggggttagcaatttaggggaggccttggtgttactgcatatcctgcaggtgaaatgtatgaaatttggttagcatggtaacggctctaaaaatacctaggctacagtttaaccacagaatttcctccttaacgtaaaagagccgctgtcgtgaggtgttcgaaagtgcaacaaaagcaatctgtctgacttcgtgcaagccgcctgttaagtcaagcctggcaaggacagcgtgcagcctctcgccatgagagcagtaattaaacttttgtgagcccggtgagcctctagcgcaaagcacaacccagcgaataaaaaacatgtaagcattctttccctgtttcaacctcttctgcccccacccctggcaaccaagcagggtgtggcaggggttcaaacagtcactacagcgtgaccacagggcctcgcccaaagaaaaacctgggtcccagagacccaaggggcaaggaggctgcagcggttttcccaacaccctctgcaccaggctcacaagacggtgaagggaaagcaacattgttcacttgaggttttgctctgaggcccttgcttgacagagacaaagggcggtagagggtgtgacctttctttccctggatgtctttgctgtcaccaagtacaggctcttctgaactctgagtagcctttacagagagatttcttacaaaagtcagtctgtctaggttgcgaggttcggtaaatgaaaatagtgacacccacttaaactagaatttcagataaacaatgaataatttatttagtaaaagaatgtctggtgcaatatttgggattatactgaaaaaaaaactcattgttcatctgaaattcagattggggtgtcatgtagtttatctgacagctctagtaaaatccttccactcctcacagtcttctgaccttccaacacccaaatcacatgctcgattgtgccttttgcctaaggttcttgttttgttttcctttctttaccctgccttttaagcctcggtcaatttacacagctggaggtagggagatgaagccccaactcctgggttcattctcacctcggtgtcaggtgctttttgtgcatttttaaaatattttattttatatgtacgtgtgccttgcctacgtgtatgcctctgtaccatgtatgtgtctggtgtctgcaggggccagaagagggtgtcatgttccctggatcaggagttataggtggttgtgagaaggccctgtgggtgctggcaacagaaccaaggtcctctgaaacagcagccattgccctgacctgcagaaccttctctccagctccatgaatagcctctttaatcaccatatcattctgtgtggtggtctacttagaacccacattttatagacaagaatttggggctcagaaaaggtaagggacctgatcaaggtcacacaactaacaagtaccaaagccaagtaagaatgatgctaacctgtgtcccagttatctagttcactgcatcagtcgtgtggttttagtagttcatgcatattaggttctctttcctaagcaatggcaatgacacagagttcataagtgaaaaaagcacaacttgccacctgaattaggactgttttccctcgactcatcctaaactgtgtttgtctctttcctgtaagtgaacgttcaacctacttccaattgttcttccctagagggactcttaactatgctctctctgcatggtatatgttgtgatatgacgtagcactgtacatgataaacatcaccgtgtgatctaagcagtactgaggccattaacagtagatgtcgctatgattgtaatcccccacagacagttttaaatgccaaggctcctgggtgtcaagccagttattgaaagccacacatcctgtacttggccgctcagaagaccagacttaagtcagttgattgatttatagtgccaccttaggaaagacgctgaacctccatgtctctactaaataattacgaattaatagggcttctctcatataaatgaagtacttgccacatggtaagtactcaacaaatataggctgagaaactggttttggaagtgatcttctactgggcgtaatagtttggatatgaaatagttccaaatgcctttctgatggtaacttagtctccatgtgatgtcgtgtttgttattcttttgtttaaaaagaagaaaagagaaatattgagacagacatattgactataagtttattataaggcccggcagagtagggagacttctaagaagaggaaaggaacagggtaaatggctgaccgccatggccggtcgccatagagcataggtgggagatagagtggagagaaagcagggagtggaagcagagcggaaacagagagaggggacagagagcaggaacagggggagagagagagagagagggcaggggcctatcttttaaaggggtcctctgcacctgcgtgcagacttctttcccatggaaccttgggctgaccagggtattgcctgagtggattccaccaggtaacaggggcaggccagcataatgcctgaacctttcagtgttgaggagcgatgatgaagtgccaacatcaccaatggactagtcccagtttggggaaattagtatatgagggtggacatactctgaagcgtggttctcaaaagaatgaccctctcataagagtcacatatcagatctccggcatatcaggtattcacattgcgattcacagcagtagcaaaagcacagttatgaagtatcaacaaatataattttatggttgggggtcaccacaacatgaagagtgatgaagagcataaaggatcacaacattaggaaggttgagagccactgcttgtggctctggcatgtcttgctctggcttcagcttcctctctgtgtcttgtgggccgtgagagacattttgctccaccacactcacagcataatgctccgccttaatgcacgaaagccctaaagtgataagcctggtgatttggactaaaacccttgaaattatgatccacaataagcccttcctcctaagttttctcaggtatttttgtcatagtgatgaaaacaaacacctttgacaatgagggtcatcagagaagattctgggttaaagattggttgcaattattttagactttgaaatctaataggcagaatcaaggatattatataggcattcttgtgaaaagagagaaaaaaattccaagcataataattgattcagtaattgtctataatgtaggcctactgatgaaaatagaatgctttttttgggggggtaatgtttcagttgggactcagagtcagtgtttccatcatcagactcaattgtacatgtccatctgttaatgctggtccagaatgagattttacatatttcatctttgaaatgtcttttcacatggataggacctgcaagtgctaatgtgtgtccatgagcataggattttaattgagcacgttcattgctggggaggtacttcaagaattccgttcgattcctctctggctttgcctttggaatgccattgcatttgtcacgtgcacctgaagctcctgtgtggcacttaaattggttttgaaatgtggaaattgcacttgactggcatcaagggccgtgaatgtgctgctgggtctgtaatttcagctcagaaaaaaaaaaaaaaaaaaaaaaaaaaaaaaaacagagcccctgcatatttgtgtgaaatcgaagtctcgcttcttgttttaactctgtcagcacaagaggcagagaaaacggtttgacgttacatgtcaaaaacaacattagtcttattgaaatgattttgctgaagtataaattacactgaaatgccatttttgtcttgtaatttcagttgagttcattaagaaacattatcaagtctgtaagaaagttcagtttcaaaactatttagtgtgcagttataatagtgggtggtagtctgtctcattcaaaacaaatttagtcttggccctgagctcaaaaaaatcataataacttattaccatacttagcaattggatgctacgtggtagaaaagaaagacactcagattctgttctgaaaaaaaaatgatcatgaatctaatgctgcttgaagcatcaagggtgaagggacctcactatcaacactgtttcaataaaatctgctcactccaaatacatcccacagaacaccagctggaactaacagcagacagtcataggtttagagagccagacactttcacaagctatatgaatttttacaacttatcttttttctgcctcaaaacaagtagttattctgaattaatgtcctcttagctcctcagaatatattgtcacctgtagttttaaaatacggcttgttcgtagaggcaaatactttagtcatttcaaatgtaagactgattcttcaactgtatcagttcaacctctcaacacatctagatgccaggtgaccactcacagccagttgcctgatgtggtcctttttttctgttggtgttgctctcagtattcttgggtttccagcaactattttgccaaaaagctagcaataattttcttttctccagataatttcttcaacatctatagtcaaacacgatttaatttattccctatcggtatacagcatcattgcttaagaaataaatgagctattcagaaaattatcttagatgcaggatcattttctcttttttgtgaagaaaaatcaacaaaaataggatgaaattacccttttaaagttttggacttttgctcaccagtgtagagggaataatgtgacagatgtttttaaactagtactaatgatgcatagtaccctctgaacagaactacaacttaatgttttacatctcaaataataagttattcacactcatctgtacatatcaccaagtgcatttgtcttcttttgatatgtttgttgtgaagtgataatttcaataagaggttagtatgttacagaataccatgggatgtctatcacttagcaagtaacaggttggatatatttgcaaatatatgtaacaacatgattgagttgaagaccatatgcaaacaagacaaaaatggtaagtcaaatgggcaaagcttattaatgagcagtatgcagaggacattcaaattgtccataaacacacaaaagacagtttccctggttattacagtgtgtcacaccatcccacattagtaccaaacagtcattgtacatggttaagaactaactcgggaatacaaacatgtacaaagagatctgtggaaaataattttagcatttttaaggaaaatattttaatatttacttataatgtagttcagaaggaaaatgaactgattacttatttgtgttcaatgagaatatacagcagaatgtataataaagtaagaattacaaaagttaaaaaaaaaaaaacctaactcagtggcttaggaaattggacaagttacacgatggacagcttgtctctacagtgtctgcagtctcggttggaaagacttaaaagccagatgacagctgaagacattctgaagtcatcccgaagcatcttcacccacatggttgtggtttgatgttgatggagtgtggagccgttggccaaaacccatgtgagcttctgcaattggcttgagagtcttcagaacagtgtagctgggtcccaaaatcaaatccctcaagaaaatcaggcctaagctgtgtcatcttttatgatctaacttaaaatcccatattgtcatgtttgccttaatcacaagcctttctagatcccaagcaaagacatatatagtctgtgcctcttagcagagaggagttaaagtcacacttgagaaaagcagataggatggggaatgttgttgcaaccattggagaaaatttatctacaatactgtttatcaggtaaatgcaagttaaataactacaaatcccttatcatggaaaaaattgataattctttttaatttcattcattcattcattcctcggtagagaggagaaaaaaagaacttaaaaacaacaaacagaatgaaaaatagcattatttttaaccatgaaaaacacttgatctaggaagaacttctttctgcacaaaatgcagttaaacgtgagtgttttaattgctaataatcgtggagtagtagcaaccagcaccctcatgtgttcccacaaatccagacaaaaacatccaatttgcaacttcaaaaggtgagaagcatagaaaagcaagtgagcctcacagcgaacactgtgagagacgaggtaaaacacaaagattctaagcatgggattgtaagggacatggtagacagtagcgtgccacactgagcagagaggtagctgccaggagaaagaatccacccctgctcccaaccttaaacaaaaatgaaaactctccagaagcaaagactgcaaaaatacattttccgacaatagagctacaagctatgtgaggcagacactaagaaatgactcaaggccaccatcctgtgacactgcctattacgctgagcaagcagggagcaaatcccaaggggaacctgcaaataaaactgctctgctgtaaaaagtacaaagtaccctcacaactatgttttcaaactctagcgctctccacctcagcctcgaaaagcaggagactcagagaaccacagggccactccatgggagctgccccaagctgaaactgacaggagcaagaacactcacactaaagcccaggacacaagtggtctgatctctataaagatgaaaagatcccgctcaaaggtaaatatgagtcagggaaggtctacagcagagccttggatgtcgaaatcctcacggggaaaagagggaccatccagcacgcttgggaaaccagagctggcctggttacaagtgacccaaagtgacagaccaggccgagggctggaaaacacctaagggaacgctgaccattgctgagagcagggcagaaactcaaccccacaggcaacctgtacatctacatggaacacttcctaccaaccagcccggtaaaacagatttgagctggagacagaggtgggcagttctcatgttagcagaagtaactcgggtagagaactcaagtagagaagggacattctctaatgctataagcaaggctaagattttaactgaagatgtaattattgttgtttcacttgtatttttaaatcttcacacttgcataagtactggttttatattagttcttctgttgctcagttaggctatataattattgtctctgtttctgcatatattctattttgtgccaaacaatttctcttacccagagcccactttattttttctttatttcatcccattctctatgaattttgtaattataacttgttatgcttttagtgatctttaagttccatttcctctaacaatatcccaattactagttacttatcttacaaattctgttgttcttatgctaatttgtggtgagatattgtttatgatttattaaaacttgcctgaggattcagaaagcaaagtcagccacaggctgtagaagccactcacacacctttaatcccaacagccagaagctaggagatggtggtacacacctttaatcctaggactcaggactaagagatagatggatctctgagctcaaggctatccagatctacacaagagtgaatcaatctgaaagagaattaatctcactcacaactttaatcccaacattggggaagtatttaagacagaagcaaagtctcagagaggcttttttcattctccagccaccctgaggagaggttacagtctgaggcttggtgaagagactgtttgtggatcatccctatcagcctcagctagaggtgagagttagtggctggctgctttgctttttagattttcaacttgaagcttgaaccccaatatcagtctctgggtcttttggtttttgttacattaattcctcgtcttaacatatttctccatccctacacttaataacaatattctagcatccttcattctgattttgtccattattctgcaaaacttgttggagctaaaggggcaatttttcttactactatattttcctagtaaacttattcagcagttgataggctaatattctgttgttagagtggtgctgccgatcatggtctgtgtgtcctgataacatggactgggggtttaggtaggtactagactatcccctggtccagtggatgggtaggaatgacctcaaccctactataaactagtatcacttaagcataacaaaatcttcagctgaaagaacatgaatgattaaaaaaaaaagcatgacctaattgcaaatgtgtaagtgccagtgaatacaaacacaagaaacatgaaaaaatcaaggcaatatagctgctctgagagtcatccattctacattaatggattccatgggagagaattggttaaataccaaataattcaaaagggtgttagttaaaagagtgttcagtggactcaaataagactccaactcctgggctgattctaagaaactttcaataaattgctgaatgaaataaagaagccaataaaagatatgaaaggggaattcaatggaagaaaaactaaagaacgataaaatttaaatcttggaaatgaaatattcaaacaaatgaacaaataaatgcattgccaagacatcctattagaaaagatcaagtgaaagatagtaccataggatcaggacaaggtagttagcacattctgatgataaccaagaaaaataataaagatgtacagaaagacttggagctctttgggacaacactgtaaattagatttacaagttatggacatgggagaaatacaagctaagaaaatagaaagaatacaatatatataataaacacatagtagaacccccatctaagggcagaaattgccatacatttatgggtctcatttagaatgcaaaaaataagactataattatagttaaactacaaagtctatctcgaaccaaaaaagaaaaaagaaaaagaaaagaagattgagagctgcaggagagaatctgcaagttattaagaaaagcaaacctatcagaataacaacacatttctcaattatgactctaagtggcaagagtgcatgcaacaatgtttcaggctcctaaggacagtaactatcaaaccaaattactctctctaccaaggctacacctcacaatggaaagataaagaaaagatcccattaaaagcataagctaaagcaattcacagttgaaaaggcaccattgtagaatatcctacactgaagagaaaagagaatccataagatatcaggaaagaataaactcaataaagtagtggctgaaaaaacgagaactaagaaaggaaaaaaaccaagaccctcaagattattagaatcaatacgtaactttcattaataattctgaataataatggtttcaattccccaaccaaatacacatgctagcaaattttaatgaaacacagggcacatatatttgttgcctacaagaaacacatctcattggcaaaggaaagcaccaagctaatggagaaaggatagaaaaaggcatgtcaagtaaacagatatagttaaaaatacagctatcctaatagctgacaaattagactttaaactgtacgtcaagaagatatgacagccctaatacagctcacacaaaacagtttcaaaacaccagttctactgaacagaaaggcacagcttaacatcaacacattaatagactaacagtgaataacttcacacctcgtgctagccaatagaaaaaaaaaaccctcaagagaaacatgagagttaaatgataccataaatcaaatatacttaacagacatctagagaatattttacacaatgactatagaaaatgtatttttttcatcaacctatggaacattttctaaaatagagtgtattgtagatgacaaagcaagtcttaacaaatacaacaaaagctaagataattgcctatactctattctttatctgatcacaatagtgtaaaactagaattcaaaagcaagagaaactacagaaaatactacaaattgtgttgagtgaacagcaacacactattgaacaatgactatgtcatcaaagaaatcagcagggacatttgtaatttctagacttagatgtgactgataatgttctataacagaacctgggagataacctgaaagaagctctaaggaggaaattacagccccaaaagcctgcactggagaaaatgtgaataggtcttatgaaacaagaacaagccaaacacagacccgggaaggaattattgaagatcagaccaaaatccatgtgacagaaacaaaacgacacaagcagagaaactaagagtggttctttgaaaagataaaccagatggacaaatccttagataagcccaaaggaagtgaacaactcccaaattgataaggtcagagataaaaagggagacattgcaaaagatactatgaaattcagacggttattatggcttatttgaatacctacctcccaacaaatttgtaaatctagaagaaatgcatacagttttagatatgtgtcgtctgctaaaacaaaactgagaagatagaaacaaatatctataaccagcaatgaaattagaacattaataaaaatagaaaagatagttaagttccagctgagatgggttccccaaaaagttctgttagatcaaaaacaaaaacaaacaaaaaataaccaacaaaacaaagcaaaaaaacaaacacaaatgcttttcaaactatttcacacaatagaatagacaggagactaccaaacccatttgaccagtattaccctggtagcaaaactaggtaaagaaaccatttaaaaggcaattatcggccaatcttactattgaaaatgcctgcaataacagacaagcaaaccaaatcaaacattacattaaaacatcatgatcaaattggcttagttccaggattgcaaggataattcagtgcatgcaaaccaatgcatgtagtatatcacatagaatgagtcaagggttattcacatagagtgagtcaaggttacatatgagcctacccataaatgcacaaaaggactttcacaaagttcaacatcccttcacgataaaaaccagaagaaacagaagtggaaggaacacaccttaatataccaaaggcgatgtacaacaaacctacagtcattattatactaagtgaggaaaaactcaaaatatatcctctgaaatcaggaaggaaacaagtctgcctgctttctccattcttctccagtgtagtgcttgaaaagttagcaaaagcgaaagaaaaaaaagtaagagaatgaaattcaaaggatacaagaaggaaaaaacaaagtcaaactatcctatgtgcagatagcatgatcctttatgtgagagaccctgcagaagccctcagaaaactcttaaaactgataaactccttccacaaaggagcaggatacaaatacaccacacaaaagcagtagccttcctgtataccaatagcaaacatgctgggaatggtaccaaaaagcaatcccattcggaatagcttcaaacaataaataaatacaatttcttgaagtaagccaaataaagggagtaaagggctctataagtagcatttaaaacttttaaaaaagaagttgaaaacactggaacacccaaagacctctcttgcttcttgctcatgggtcaggggaattcatattgtacacatggttttattcctgaaagcatctacagatagaatccatgtgatcccatcactattccaaggaccgcttacacagaaatagaggaaaaacataaaattcacatggaagcatcaaaacccagaatagtcgaagcaatcctgagctgagtatcagcatgcctgatttaaacatctactttatagcaaaaacagcttttaagagcatggcattggcagtaaacagaaatgtaaatcaaatgtagaacacaatactctgaagtaaactcacacaagtgacgtcgcctgatttgtgatccagatgtgaaagggatacattggaaagaagatgggctcttcaaataatcctaggaactggatacccacatctacgggaattaatcctgtattggtcgctgcataaaaatgatttcatatagatcaaagatcttactagcaaacctgaaaccaagaaactggtaggaaaaaaaaaaaaaaaaacattgaaaacacagaggatgtaggcatgagcaaggactccctgaatagtattccaacagctcacaaatgaaacaaagcattgacaaatgggattgcatgaaattggaaaatttctgcacagcaagggaaacgattaattgagggaaaagacagtacacagaatgggagaaaatgttttctgtttatctgacagaggattaataactataatatataaagaactgaaaaattaaatgtcagacaaatcgatctaattagtaaatgaactaacaaaacagacagttctcaaaagaagaaacacaaattaaaaacataccaccaacagaaaaattaaaattaaaataccattgtgagtccattcaacccagtcacagtgaccatcattaagaaaggaatagcaataaatgctggaaaggatgtgggaactggagtggggtcatataatacactgctagtggcaatgtcagttaattcagttactctgaaaattagcatagaaattctccagtaaacaaaaaagaaaatagaactactatatggcttgtctacaccactcctgggcatacactcaaaggactccaaatcaacataacagaaacttgtacatctgtgtttattgcagcactattcacagttgcaaagttacagcatcagtttaagtgtctgtcaaaattaatggacaaataaattgtagaaatatatatgccatagagttttattcaatcataaagaaaaatgaaactatatagtctgtaataaactgagtgcaactagaaatcatcatattaagtaaaataagactcagaaaaatacagcccatgttttctctgatacacacacatacatatattcatacatatacaagcatacatatatgtatacatatgacatggatattaaagagagattatctgggagagtgaatggaaatagtaggaaagagaacaagaaggagggtaggataggaaacaaggtaaaaagaaaagatggtgtacattcatgaaagtgtcttttgtgaaactcatcactatctacagtgaatacggggcaataatacttctcacaaaaatgcaaaatgtctgactttaatgtaatgcttaagattatatcagctgatcacaagaacattaaattgttaggacaggaaacaattatcttcctcattgtgccttaatagcagtccagtgtcatagtcaaataacagaaataagtcccctgtccttgattcaactcactcttcaacatgagggaatatatgtactgagcacacagtagcacttttcctgtacttatgccatcttctactgggagctggacaagaaaggtggaagacaatgacaaaagattgtgtaggtgttgagtggggagtggtgggagacttctctgaccttaaactgacttaaaaagccaaaaacaaagatgttttgcttgagaattttccaatatacaagatttacttccatgaataattttagtgatgggttgatattgaaaattgtttatatgagaagtgcataccttatgtgacagtattcttacaaaatctactaacgcagggcttttcttttcacaaaacaaaatgactttattttgttacttcttcatatcttatactattgtaaatatgagtgagtgatttttatgcttacttactatcctaatgatattcatttaatgacaactatatggttaattacaaagcatatagcagaacctatgcacatgtttcacacagttgggttactatatgactgttgtgtgaatttcattgtcacactctgagcttggtatctaatgctgttgaaataaagccgacaatcaaaccgctagcataaaacaaccaagtgcatgtttttccagccatgctagagtgaaaggtagtagacctgctcttcctgccacatcattttgacactcataaaggattattaacttgaaattgctaatgaaatataagcccttggtttacaaattatatcctaaacctatgacaaacacattgactcagctctgctgcaccattcaatttctcagtatgaaatatttcaaagagaagcaagttcatgttttcatgggatgtctgctcaaatctcttttgcacatgaatctttatgcaaaagggaagcttgcacagtgaattgtcaccgagtgaaaaaccagagtgtaaatcagttttcactccaggcatctctgagctcacgaactcagcataggaaacaattacttattttgcacattctgtttcaatagcaatccaatttcacatttatataaacaaaaacagacatcctccattcctaatttaactcgctgtacaacaaaaaagcatgtatcctagtgaacataaaaactgcattttttttctgctagctggtcttttgctgtgagttaaatgaataaaaatattcagcacagttgattatttcaaattacaaatgttcatttatgtagaaaatgccctaatctttcttagctttacatacaacaaaggttatttatcattaatgaagtagaaataatactaattcttacaaataaaatagagaaaattgcagctggataggagcaaaagtttgttgatattggaaactgtttactggacaatgccaaacgaaaagatcaatgtaggatcctaaaggggatttcagggaactcttacaagttgtaggtctttgggggcttgtgattccatggcttcttaagatttatttattttagtttttatgtccatgtgtatgtgtactacatgcatgcagtgcccacagaggccagaagagggcatgagaacttggaaatgtagtgttgtgagctgcctgtgtgcaggaaacccaacacaacagtcttctgcaagagcagaagagctcttaacgactgagtcatccatctctccagcccctgatcccatgattttgcatcccattttgaaacctcgtggcttttcttatgttttcattgccaagtattaaaagttatttccaaattagtttgaatgttttctgttattttcaaggcagagatctgttttgttagagatgtcctgagtcttattcataaatggaataaaagagaaaaggaaagggggcaatctgtgtgctaagaaaggctcttcctgtgactatgagaagagaaatggaggaggcccagggaaggaaggagagagaacatattgagggtattctggcttttggtttgctttggttttgtttttaggttctagacacgctaagaaggagatttgaagggacctattagctgagaaaaactttgagggaagcaagcatgagatgacctgggtttggtagagcatgggagcagacaagaatgttgcatccgataacaaccagccagaacagcttgcttgctgtctaagttagggtgtgagtaccaggacttaagacacacaatcagcatgggacacaggcaactgagggtggatctggctgtgtcagaaaagactttgacaccttaaaactatgatattgcacatctttctgagagaaaaaaggacaaagacttcattttcttcctccttggttctcaaccctgaacctccatcagtggtcctccttatggatgtcttgttcagttcttttcctgtgacaaccattgtcattttcactcacccttgttctgttccagggttgtaaatacaaaattactaatcttcacaacacagcagccctttcagctgggccacacccctgtttagcaggaagagagtctggagttcagtaagatgatgtatgtatcagctcattgtgtcagatacatatggcattatattgttatcacattgcgttatcacatgcttagttataagcagtctctttattagactcagaaatgcaggtacagttaacccatatgattggcattgaacatttgcagttaagaaagaaagttaagatgagaaattaaggaaaataaccaaaaccttaacagtgaatatttatacatctatgtcatagataaaatggaaacaaaggaaatagcaaaaaaatgaatagtattccctaatatgtattaataatcttattttaaaacattggaaagaaagagtcgatctgaaaataaaaaaataattgtattttcattcaaattgaaaatgtttctagttaggcaagtataattattaaaacataaataaaatcccaaaggtaacattaaatgaaggatagtgccacttatcatttttgttccctatttcagtttattttcttcgcctttagctgagcattgtgggtagttgttattttgtaaacagaaaagcagcttgctggtctgcaaaatacaaaatgaacatattttttgagtagctcattctaccagattctgacattttgcctcaacaccacagacttcaaacattgttttatgattccaaagccatgaaagttttgaattagaatattaattctcttaagtctgagaacaaagtgacatacgtgtgtgtgtgtgtgtgtgtgtgtgtgtgtgtgtgtgtgtgtgtgtaaataagaagtgacttgtaataaaatttttatgattatgaattttagaacaactatattgctcatgaatggcatgctgtcctgaagtaactaagtggctaggctgggaagaattgctgtaaaatatgcatgatgttctgtgacattttggataatagcatacacagtgctgtatttccatatcccatcccatctgaagctcagcacttttcctgcagaaagaatggtggcataatgctccaaaaagtttagaacgcacagaaataaggacagcatttccagccatttcactgtggtttgctgacttacaatatctgttctaaaaagagaaccagaaagccaactacatttagattctgaaacccccaaatgaaaactcctgagggtgaaactgtcagtaaccaggacggagctgttttacatctttatccaaaattcatcctctgctcttgtaatcttttggttgacatgcatttaatagtgaccaacacagtgctagatgcatagtgggcttacagtaaacattgtttaactaactaacccatatgtatatcatatatatatacagtttctatgtatatatatatatgtatatgtatatatatatatacagtttctatgactaaaagtgaaattttttcataatggtatggttagaacttgttgctatagaaacaatcgaatgtcattttagcttcaaggaaccttcagagagggaggaatgagaagtgagtatataatacagtgattgtaagaaagtcagaaggttttgcaaagagccatctgtggccacatctgcacagctaaatatttgtttgctttggtcactgggggacaggaggaaagaggcaaagaggtaatagaagcaggaaccagaaaagtaaatgcctctttatcttgagattgttctttataattaattacagaggtagcgagtcagaaagaaaataaagacaaaatcaaaaacaaaaactacctctccctgacatctgaggagaaaacagaggactcaattcaccccccatattggcgacaggctcagtttgggccctgccagtgacatgcctttacaacagagtctgtccagtgtggatggatcacctgttcacttgcaaaagctaagaacttgttcctaaaagtcagcctcagctctatgcatctccactaggggaaaactaagatgagttgggattaattaaatggtattctatttataagctagtggtacttctatgctcttttcctctcatctaaagaggatataaagtactgactattgagatcccacatctaggaagcatgtagataaattggccctgctagaggaaactttatttccctagaaccccagtgcatttgaaattcatcccacaggcttaaagtaaaatatatgcatagcaaatatatatggcttacatgctaaatgtttttatttgggtaatagtgttatcagcaagcatgtgagtataaaaatagattaatcctaaatttttcagcaaaattcctcaagtgatcatactacagaacagagaaattcatttctagtgacaatttcttttatgcaattgtggaatagagttaatattaagaaatgtagccaagtgtggtggtacacacctataactataatacataggaagccaaggcaggaggaagctattgtaggtggtaggaaaattatccaaactacaggattttattcatttacaaagacaaatacctaatcgaaaaaagatttccttcttaaaaatccacaatttacattacgttttcagaaatactacccacccccaccaaaccttggcatgcttgatgattgactgagcgtctactcattttctttttatcttctgctttgagacacaaagtgtcctttacttgacagaagatattgttaatgtgaactaccctgacatgtcaggacatcagaatgtcaccaggctagaatgtaacttggtttagagtttatgtttagcaagtgaaaggctcttggttggttagatcaccagagtgcatacatgcatgcatgtgttcatgtgtgcgtgcgcgcgcacgcgcgcgtgcacacacacacacacacacacacacacacacacatatttacacacaaacacaaaagatacactcagagacaccacaaaaacctattaaaatcaattactattgtgtttttgcaatgttctttttatacactaggtattgtgttaagtactttctattatctaatttcaatttttttaacagccctttagggcagacgctattattattctcattttacaagaaaacagatgcttggagagattaagtaactcgactaaggtcatacagatgtcagaaccaaaactcaaacccagatttttctggctccagagatgcctctcaggataaaagaaatatttccccagggaactcctacatagccataactgctgaagtctgtcatcaataaactctagatttattgcttgccaaaagtacttctgaaactgtgcttccagctaaacgaccgctctgcctatggagtccaagtgcacactcaatttatcgcaggcaaagtgaagggggactgcttctgggatggttttacacagaaggaatgactcgtgaatggtagattgtcgagccctgtgctggcttcctgtgggagctatttatggaaacttggccttttggtgctagtcctacatccattttaagtacagaaagatcagctatcctagccaagttaccattatctttgtgtatccacattgctggatggccagatcttcaggagttgaatcagtacagtgcatgaaatttcttgatgttcttgaattcaaaataaaagtattaacaataagtaactcgagagtagtttcccttgatctgagcttcaacagttacaatacaaatggtcctcctggcttcgactgtctatgagctacagtcctttccatatggtggcaagtcaggaaaattagcagtgctctgtaattagcttcaagcaaagaactgtggtaggagatggaggctttgagcaaatgttggcatgaacagtgttaccattaactacagtatctggaatgggcacacagtaatagtggggatcggagctttcttatcaacatcattgtattctttatcatgcccaaaatgtcaatgccaggtgaagaagactatagtaaaagtagaacctatttcatataaaatagtatggacttcataaactataaaacactttcactcagcatagtgcagggcccatgatttgaccttaagatgttaatttctgccactcatgagagtagaatgttacctgactttgcttgggtgctttcctagagaaaactagaaaaacatgtacttaaaacaatttcactcaaggtcccaggaagaaagatagtctcttttaatacatcttactgcaatgatttcctgcaagtccagttaccaaaccctggaacagttaaagcaaccagtaaagggagttatagcatccagggactaataatggcaggatgccattaccagcactaggcctaagtaagtgagggaaagatatgtgaccagtgtccaaagagaattggaaagaggaggggaaagccacctgaaagggatttagctgtgaaagggccagaagtgccagtattggcaaagcataccaaatgggaggatacaaatgtatccatagtcactgtctcatttttacactgccatgccttcctatgtttctaactggccaaaggcttccagaaaccagagctggagggaattcagattctagagggtcagtggccctgactacagatcaacaatgaaggtgaagttgactgcgatacatttctgatttctaactgtttaaatagaaggagtgaaggagaaacaacactttgattacctgcattaatattataacatcatatactaagaaacaaataagacctaaagagagttatataacatacaatgagtgagaaatttctatattatctattattaaaactcacattagtaacatgaaaaatgaaataagtcgcttagcaaagtgatgttaacagtttccaaagctgaaagtacatatttgctactaggtaaggtatgtgagagatgttcagtcttatattaaagccaaaataaaatgtctatttcctttcatattagaaaaagataaaatataagcaagcattataaaatggctatttcctgtaccattaatataaattataaattggcataactttctaaaaattacacttattctacttcaagtctgaagggtataattagaaaccttgataaagatatatacattaaaaatgtttataatggctatgataacataagaaagaaacaaggcccaacattaaggaacaacatccatttcaccattaaaagtttcattcacgtggagaccatctatcatatagcaaaccaaaggttatagtctgcaaaaactgtgtgtctagcatgttcacagtcctctttgagaaaagccaggaagatagaaaggaaaaatattatcaaaacattaattgttgtttctctgggtactgacagcatagtgatttttttccattttctcttcttatgaacttatcaaatctaacatgagactgtctttattaatagttgcaaatgccatataagaattagtcatagaacgggccatgcaaagcttgtgagatatagttcttgtctcaggttatttataatctagttcttaattttgtgttgttattgtttaataacaattattcatttcattgggtcatataaaatgaaatagcattttctgtattcttcaaatgatatgttttccttgcaccaacttcccatgccagacttaaccctgtctatcagacttaacttcaaaataatatccaagctttcagaaaaaatacacagagagggttctttaggacataggattctaggtaaagatttataaacagatatggaaaatgttattgagaaaatgataaactttttaaaaatctttacttaaagccttattgttaaaaggggccagagtgacctctgagatgaaagcttttgcattcttcttgtaaaagtcacatccagaatgtataaagaattgatacacagtagtaagaaaaggtcagacaaccacagatgacaatgttaggccgagtccatccaagtccaactagatggaagctcgtagttgttacttcagtatgcacacacatgcacttacacggatggatacatgcatatatcatatatcttatatgtacatacatagatattctgtctaaaatggaactacttctggctttctctattgttatatcaaatcaaagattactgcaatagctatttagaccagtttcattcttaaatgtctattgtcttctctgtcacctaatatgactgttatttcaacagaaaccacatcatgtgtctttgactagcaaagcagtaatagcttccaacatcaatcaagtagaatgctctgagaagacatatctttgatagctgaaatacattagccatgccatcctcacctgtaacgtgtccccttaacctgcttcatttttctgtattgcttattcttatttgcctggttctgcattttagaatttgattctctaccaatcacatgaaagataatgggagcatctactttttctgcctgctttatacctctcacatcaatatgagaacctggcatagggcaggcaatgatggagaatgaatattttctcaccaaaaccagaaagagtatatattaccatccttcttttacggagtacaaaactggatgaatgagtcacagtaggaaactaagaaaattaaattacttaatgtcttgtgttcttgtcctttcctccactcctatcctgtcaaccctggatgtgcacaaatgtgcacaaagacacacatgaaagggtcatacaataggaacagtcccctaattaatagactgttctcctcactctaccttttagcccttccactctcatcataatcataaaatgtctcttaaaatttatatgcataaatatataaaataatagatgatttgaaggttatataatatgcaaatctacattgcataaaagtagagattatgtaatccccttgactcacaattaaatgaagatggtggctggtggcattcaagtaaaagttgattatacagaaataatgcactttcatttgagccttgctttgtgatcatgtggggttttttttgtttgtttgtttctttgagacagggcctctctatttagccctggcagttctggaactcactatgtagattcaaatagtctcaaattcacagatatacctgcctctacctccaggcagaggtatgcactatcatgcttggccctcatatatctcttttatatacaaggatacttgataaattattatttagctttctgaagttatatgtttccttcagcataagaaggttttgggggagtttctgtttgtttgtttgtttgtttgttttttaaagttttttcaaacaaaatgggacagtttttaggtctgacctgtatttcaaaaacctaaaacttgacatcctaaagatgacatttttgataagtgagtctgttgaaaattggattgtttctgtcagaagtcttacctctcctgccccgtcagacatgggtgtttatggttacttgctttttctctagagataccaattaccttttcaaaaggctacccaaggggatttgtcacttgacagtttgtttaaaatttagctacatgtacaaatatgatggaggtgagatccaatttggctgtcaacctatttgaccctttagttttagttttaaaaaatgtttcaggcttttataggtactcagtagctcaaaattttgtatggttggttgattgctttgtttactaattgaaagattgttttgttgtgttttttattccacaaatgggcaacttaggaaaaatgttcttaatttctggcatttacagctctcacctcttctctttcagaaaacaaaaatcatagcttgatatcaagccatagcttgaaaagtgaattaatttaataaaaataaggcccctcattctctgaatataatggggccagtgtcagatgaacatttgtttattaagcaggtacagctttttaataagacagaaaatgatgtctggaggaaatgataagcattttcttttgagtgtaaaataatcatgaatgtctgagaagaaatcagtgttggagtttattctgaaactgtggtcatcaggaacaagttgagtttataaagatgtgcccgtgtctaaaaatgagaattctaacttcattgtagccagtcagcatgattaatcatctccaaatcacagcttttcagagatatacaataagaatatttaaaaatatgtaacatgaaagactttggtgaaattcagcatcatagttctaaaaatatatgtcaactattactctgacactatttgtagtttttactaatgtgcgggattatttttgtgtttaaataattttttgaatactctttccacctctttgtactcctaaagctatttctccaagttggaaccaaggatccttgaagttttctcctctagataaggttacttctcagtgcatgagacatttccaagtattctgtgccctaactgtcttccctagccctgatttggccctgctgaagatgtgtatccgggaagtgtcccatcacactgatgactggggtgtggtcctctgcctaaaacgctactacagtgcgataatgggaaggaaactgaaaagcaaattaaatggcatagacatattgaagcggccataattggtcaagaatcagtttcctcacataaaacttggaaatagtattcaaccttacagtatgatggctatgattatgtgaaatgttatgggaataattagcaaaaatagtcacctcatagttaagtgacaagtatataaaatctgtaatgttgccagacagtccacagccagaaaatcatatatgaagctagagcagcaactgagtgccagattttgagagactcaattggtagtctaatgaacttgaaccttcatcttactaagtgcaattgtgccggcattagtaaacattctgaaagggaaaaaaacaaaaaacacaaaacagaacaaagaacatttgacattacctttcagaatctgtggtgagtaacatggagctgctggagacacttgggacttgtttaaaagagctttggatttgatgactagagggaaagatgatatttttgagtttgttttgttttttcttccacagtaattactgaatgccaaaggcagcaactagcatctgtgagctactcctctcgctatgccctgggcctcttttatgaagtaggcatgaagattgatgtcccatgggctggacgatacatcaccagtaacccctgcgtgcgcttcatctccattgataatcagaagcgcagcataggtcagtactccccttatttcccttaaacacaggaatggtggtgggtgtaggctgagaaaaatttttgtttaattgagtgttgccattctgaacagaagaagtgtttaactccaagccacaggggataaaacttaatgtcacatttgctcagtcatgaaatacacagtgaaaccaggaaggtttttcagaagatatttcaccatgtgatttgttttactgagttcataaaaatagtgtcagaaagttaagattgcaaaatggcctgggttctattgctttaatttgtatctgtctatatgcaaaatgtttctctcatcgtctgtttcttggtgagattccattgggttatttggtttaggcttttattaaatttggtaattgctaacattccacctccccagctagattaaaggtaaattttaccatgctatgaaacctatcacttctataatattttgaagtctatgtacatttcgtctttttgttttgttttgtttttcgagacagggtttctctgtgtagctttggagcctatcctggcactcactctggagaccaggctggcctggaactcacagagatccacctgcctctgcctcccgagtgctgggattaaaggcgtgcgccaccaacgcccggccatttcatcttttttaaatgaagtaaaattggtttgcatgcaatacacctaaagtgcccagaaaatgtttcataagaaccttcctaggacacagttaactccacattttaaagatagttctaaaacttcaattcgatttgcaagaccacctgttgtagaggcataggtataggtagatagatctctgagagtttcaggcccacctgatctccatagcaagttctgggccagccagagctgcagagtaagacagggaaaacacacacacacacacacacacacacacacacacacacacacacacacacacacacgcacacacggaaggaaagaagagaggagggagggaggaggcggaagaaggaaggaaggaaggaaggaaggaaggaaggaaggaaggaaggaaggaaggaaggaaggaaggaaggaaggttgaatcacaaaaaaaaagataacctatttcagaaaagtgtgtgtatgtatatccatgggattctggtaatgtctaaggtaatgttttcataaataaactgtaatgatctaagatgataaaactcacgaaaggaatcatgattgagtttgttgcagcacttcactgtgcagcgatgcttttgttggcccattagttgcaagtcttgcctgataaaatcaccaactagcgtctcttggcttgccagaagtttatgataggcctcagctggagtgtgctttctctgtgagagcacacaatcttagaaaaatgtttcttttataacttaaaactccccaagggtcgagttgcttatgttaacatgataccacatctatatataatcagcagctatgaaatgccctgtaacagcaatggacattagctgtgaaatgtagcaatttcaaccctgcacctgtttgttctgagaaaaggaaaataatccctgatcttttcaagttatataccatgaattagacattatcttttgtgtgttactttataagatagaatatctatgaggttatatattcagctgtatgtaacaaaaaaacatgtttaaacagcgtaacattgttggtaatgtctactatggacaaacgatgcatttcctagattgatctgttggagacatagggtgttgctcagtggtagaacatttatctaatatatacaaagatgtagatccaaacctagcaaaaaataaaagaaagaaattcgtagagcgaaacctatgctgctcagatacctgagagatcagcttaaaaggaagaaagctggactctggctggtggctcttaaggtgtctggtggctcttaaggtgtcagaccatggttttcatataccactgttctgggcatgtagtgaggcagagcatcatagtatatgttctttctgatgtgacaatcctagctggtatgagtgtgtgtgtgtgtgtgtgtgtgtgtgtgtgtgtgtgtgtgtgtgtgtagagacagagtcaaaagtctcaatatatagccctggatgtcctagtattcattttgcacaccaacctggaactccatagatatctgcctgcctttccctcctaagtgctggaattaaaggctatgtcaccatccacctatattccaattttatatgtatacatttatgtagaagtggttgtgggtttaggacatgaaaatgaaaagggaaccaggagacagaaaaaaaaacaggatttaaggaagagacatggagtgtcatacaacatatgagacatgaaagggaaaataccagggacagaatggtacaagtgaaaggggaaaggagttagaagggacagggaattaagcaaaactaaatatgtatgaagatgtcatgctgatgcctgttgttttgtatgatagttcttaaagagagtgtctgacagagcaaaattatccacctcataagagcaagatgctgaagtaaagaatgccagcattggctggcttcttcatccttcttcttttacttctcctggctctccagtctcttatgtctttgcctctcagtaattcatctccagaagcatcctcatagacgcatccacaggtgttctacactaatctcctagtcagttcttattccaatgaaactgaagtcgatattaaccatcacaaagccctaatcccaatgagattatatttggagattcagttcaggtaataatgattgcaaggagtcctaagggtggcatcctagcccaacaggataatggccttaagacagcaaaacagaaaagcttcccttctctctattgctactttcatataccaaggtaaaatctaaggcagagatagcaggcacctgcagatcaggaatcaagccctcaccaggaagcaaatcaaccaataacagaatcaaggggttctcaggctccaaaactgaacaaactccatttatgtgaactacgcagtctccttaaggtttcacatccattccttttatttccaagttcaagggctcaaagctagggccttgtaccttagacgcatagcaacacacgtaggaagactctccacggactctgctccttccagagaatctgtccaacacttctttaatatacccattctcacttttgcatagcagaccagaattgccacctggactgattccaaaccagccagttgtgagacagataagagtatcatgagtgtgaggtggggagagtatcatatgcctaaaatcaaatatatccctggagctggtatcacagtcctgttagccaggagacagaataacataaggttttgttatagagaaaagaagaaggcatgctgatggctgtgtggccctcagtacttcctgtcatcttcaagcacagttacatcttatgtaggagggaaaattctaaatttatcattaaaagaaaagaatcacatgtattcaaaatttcctttgaaagcccataaaacttcatgatacttttgagaatggcaaaaatcagtaaacttgattgtggtggtttgaaagaaaaaggccctcgaagggagtggcacttttaggaggtgtgactttgttggagtagttgtgaccttgttggaggaagtgtgtcaccatgggggtgcactttaatgtctcctatgctcaagctacactccgtgacacagttcacttcctgttgcttgtggatcaagaggtagaactctcagttccttttccagcaccatgcctgcctgcatgccccctggcatgaagataatggactacatctctaaactgtaagccacctcaattaaatgttttcctttagcagaaaggttgagtcaggggaagaatagaagaaaggatatgtgataggtagggttttagttgggggggatggtaggggagaatgggagggagaagggaactgagattgtcatgtaaaacaatcttgtttctaattcaaataaaaatgatttagaaaaaaataaatgttttcctttatgagttgccatggtcatggtgtttcttcacatcaatagaaacctaagacattgacacaaccttttgtcaccatttgaatagatttacatttccttgagccatattagattaataaccggattgcatgtataggagagaggcatgttttcaactgggaaagacacaaaagacagaaagaggcctctctgaacagattaagttttctctacattgaggtgggagggtgtgtgaaagcacccacacaataccaaaacaacaatttataaaactgaatggatctgaaaaaagcaaaacatagtatcaagaatgtctcatggttgtcaatttttgtgataataaacatttaaatttctcttaatatcagcaactacacaattttaagactgaggagccaaataagttagaaatcatgtttgttctatgcctattgtggtggtgtttcaagctgccaagaaatacctaccttctttgtcaactgtatgaaaattgatcttctcttgtatatgcattaatttgaataaagtctatagtaataacttttctcagcattcaatctaaccaccttcacttaagctgttttattttttctatcagggtccagagtactaagtgtttcaagctgacttaacatgatataaatgcctttataatgtaatcccatgtgttttggcatactaacatctaactaggtgaataagagatgttgtttctctatccctaccctccccatgcctttggtggattttcttgaatgaagaactagtgccataatacacacacaaataatggaggggacatttgtgttctgtcagggtaggcaatgtaaatataaataagatacataaaatttaccaggattgagaccataatacaatctgttaataaggctccagggacagaagataaatgacccaaacaagatgaaggtcaaggcatattcatttggcaaatgtcagaaacagatagtaagtgcagaaagccacagccagtaccaactttctctttagggagagaaaggaagctccaaggtgtaccacacccaatttcaaatgccaacaggtagagtgtgaatcagtattcattcgtgttccaaaaaatgtgtcctatgggatactggttccttgggtgctctttttccaatgaactttgttatcaaatcagtttgttgacagatttacccctaattcaaagacttccacaaaattccttattaaaagaaatttctacagaaaagacaccctcatttcttcaaaaattttccaaatgtacttgatcatggatcatttgaaggtgcattaagactatgaaaacccttcagtacacagctaagaaatcctgatttgatgttatcttttgtgcttcctatgtggcaggaaactcaggccagataggtctggtcctgaaggcattcaaatgttatggaattagaatctaatatattataggtataaataaaaaggcctttatcgttttaatagtttacatcttaaatgtcccgtaaaggctaatgcatttaacaggcttagccctcacttgggaagtgatataaacaaaagaaggtgaagcctagtcatggggatgtgcacttgatggggacactgggaccccagtacctctttttctctctattttgttacccagtcatgaggtgagcagctccagctatggtgtgccccctggccacaagcccaaaagcaaagaatcaagcaaccatgggccaaaacctcaaaacctcttagccaatgtaaacctcagatttttattataatactatcatctatggtatttgttgctataatgaaaacctcactaattcacttgaatgatttttgaaattatttttaaggttaataggggggatttggatatcaaattaagatgtagattaaaattctggttcgaaacagtctatcagtgtgctctggcatgagacttgtacttccttgtcaaactattttaaaataacaaacacatgtaaaactttactgacctaagtatgacatgtttatttcttgatccgcccaaataagtgttgattggtgggtagctttcatcagagaacttcttcaggcaataaacatttaaggacatggaaatgtcagtcatctggtttgatcctcatatgttatacgtctgtatcaaattatcactatggcccataaataaacacaattagtatatgtcaattaaaattttttaaaaagtgatggaaagatggttcagtggttaaaagcactggctactcttctagagaattcctagcacatatatggaagctcacagctgctaactgcagtctcaggggatcagaccaataaataattatgttagatccaagaccttaaatgcagtcaccttgtgatcagctaatagattattcttggttattccaagtgagtggacagtctgatatgacagcataaaatgatatgctttgagactgaatagtgtggaattactggaatctgcagaaaatggagtctattgtagtccccagataatgacatggagacttattcctaattatgaaagcttggcctttatcttatacttgttcccaactagctcttataacttaaattaacctgtttttattaatctgtgttctaccatgtggaaaggtaaagacctttcctccataatgtatgtccaacttcctcagtgtcttgctggtgtctctcaggtgcctcaaatttttctccagttcctctctcctcctgaaagtcctgcctattctctcctgcctagcaattaaccattcaactctttatcaatcctatctgagatgccttggcaaagatacaccttcacagtgtatagaaagattatcttacaacagtctagagaagttaatttttttataaatagaatacaaaaagataaaagaaaagagaaagataggaaaaaggaaagggaacaaaccataatcataaaaatttccatgtttctagttaaggtttctgcattaacatctgagttctcagagtaaatagcaaccctgctaaaataatagacagtaacaacttaaaaagctgtattatagaaatatcaggtttttgtaagctcaattataaaactgatgcttccatataaattaggaaaaacatgttaattaagagaattcaagcactaattgcaagtaggcattattattgttatgctgtagactatcacaagatatatatatatatgtatatatatatatatatggatgataatattaaaacttggagtaatgacttaaaaagaaaaagtcatatatttgagcatgtaaaactgtctatatacacattcatatataacatatgtaagcacctatgtaaaatgcatgttgtatatgtacatatgtaaatattttagtgtttaaagtacagcttataaaataatctcatttttatatatttcccacatttaaaaacaaaaactgtctttcattagagaatgaaataactcagcctattttgtaaggagaacatttgcatacaaagtcagactaaacaacagaccccttttagcctctggttgtcctgtcaatctgtcctcaacaggagattacatctaaaataacacttgtccacccacttgccaagcaattcgtttcagtgtgataattggtgccagggttggaaagagagaatcagctaaagcaactaaatgtatgcatcaaaaatagtctaaaatatgaagtatattactaggatgtgtgtgtgtgtgtgtgtgtgtgtgtctgtgtctttgtgtctatgctgtggcacacccacaacacacacacccacacacacacacacacacacacacacacacacacacacacagagagagagagagagagagagagagagagagagagtttctttcagctaggttaaagtccaagatttttttagttacatacatgttttccattttcaaattattcaattagacaaatatgcactaattgagttttgaatgctttctttgtgccagtcactgcacaaagaactgacgataccagagttcccaatatagtttcatgaagtggccaaatggaaggttctgagggtaaaaggcaccatttgtcttggttcactgagaattctaataagtggaaagctatgtaaggacctataaaatatagagtgtaaacattatgggtttttaaaagaatacttagaagcttttgtcatcacataccaagtaattcttttaggtgagaaaacaaaggatgagcctaagggatttaagttttaagttgtttgttgtgtaagttactctgcaaccttcccataacttccccctgtctcaagatgattctaatctgagcaattatttcatatcctcgcttcttttttgctcaaaggaaggctggtgtaataagttaaagcccaggcagtttttgcaatgtcttggctaaaattaggtaggaatgcttaagtgggctcctttgcagaatctcctgtcagctgaagtaatatggctaccctcacatctgggcaagaaccttactttgaattaagatagaattcatcctgtggaatctaatacagaaagctctagtcgaggttttggtaatacctgcaacagtgtcagtttttaggagagatagaaactgaacgatggctgtgtctataagactgggctgttttgaaagatcttcaagttaggtccttattgcactctgaactgaggctgtcagctctgtgagctgtaagccagggctcaaaataatgtgtgctgctcagcttcccagacaagagcctggttttcatcattctggaggcatctcaaaacctttgcaagttgagaactgtattgtagaattgtgtaaaactcagacagcttgtgagcctcaggtcctgggaaatagcaaaggcttcagctggatgaaagcttgacaagtcttcattgtggtccatttttatctgtgaccatgacaacactattcagaaggtagggaatcaatcctttacctagatgcccttcagaaaacaatttcatcacttcccttactgtcaagaatttctcctcagatcagtctaaatgtctcatgggctaagagcatgctgctctcaccaaaattagaggttctgtccttcagtgcaaatatgaaccatctctcatcatacatgctaatattcactagtccttcttatcttgatcaatactgaaaataagaggtagacattatcagcattgggatcatagggttgagtacccagtgcttagcaaatattttctgagacagacatatctcatatgcaggtctgaagagcccttgcttggccctgaaataatacttgagaatgtgtaacttagcactagtcatccacttatctggccaggaaaagaaatggctgggcagtgaattgtttatccctaaggcaaacaaggaacctgctattgttacccttaaattatagaaatgaatgaactctccattaaattgctagatctgaaggccactgaagaagacatatgaatctctggcagaagtgaataaagcttccttttagggactagaatatttagtgactagaatactggcactactggactatgaggtattaccagtgagatctggaagttttattgaagctttttctcagagaggtattctcaataagcattttcccaaggtccctgaggaatacacatctgcttccaatggtgccctgtaacatagactttaatttacaaagttacacttcaaagaatcctgctgttctctttgtgaaagatatttctttttaatatttggttgaaaaaacaactgtgctccagctgagattgttaacttagaaaatatgtgataaactcactaaagttgacatttccctgctttactttagcagttttctgttggaatatcaaaatcatattaaaatgttatcctggatagtgtcttagttactgttccactgctatgaagagacaccaccactaaggcaaatcttatagaagaaagcatttaattgagggcttgcttacaattttagagtgttagtccgtgaagatcatggtggaagacagacagtcatggtgctggagcagtagttgagagatttccatcctaattctcaagcagtagggagaggagaggggagagagagacagaaacagagactagagctggaatggtcttttgatcctcaaagcccactcccatgacactcgtcctccaagaaggccacaccacctattccttacccaacagttcaccaaatggggactaagcattcaaatatgtaggcctctgggtaccattctcattcaaacctctacagatagtaatcctttacaaatgagttcatgtttaatccagtgttggtaggtgaactctttattgtctaattcataagtggtcaagtaccagtgttacaaagcatagtgcaatggtctttgcaatatacaatcctacctttaggttgtaattcagcatttactctagagtaaaatcagttcaatgccagcatcttcatgtgactcaactaagagctctgcaaccctgtttcctgagtttcagagtgctgtattaaaagtatattgtctctctaaaatgttataagggttgaataaaatactatatacaagtcccctggtacagcaccagaaatgttcatagtaaatgctatttttataatgtcataaacaatgtatttatgctattagtctatcatttatataagcatactcattgtagaatgagacaaaatagtaaagcagccatactatagaaactaggcagtggtggcacacacctttaatcccaggactcacaattaagaggtagacagatcactgttcaatttatccagtcctgaaagaaacagctcacacaatcccagcactagggaggtggagacaggagtgatatggctgggcagagaaaggaatataaggaggaggagacaggaactcagagcttttgcccctgagatttgtggagacatggttgccatttcagattggtagaggtaagatctactggcttggctactttgcttctctgatcttcagtggctttaataagttataaacaatataccactacagggttcttgctgtttatggaagctcagatcccttttcagtaagaccagcttttaagatgatgagaaaaggacaccatctgatgaaaactgactccaaagattaagactatttcaagagcaagtgccaagtctcactacttggagtccctccacaggaaatcacttcactaagttttataaaagctttatatcacttagcatttttaactgtccagaatcactagtccatctttttgccacttttaacagtattgattcaattcagcctaaagagtttttacgttattactgatgactttcttgttattaagtgagtggagaagatttggtgtactctctgagatcctgtgcagacctttgtatttttaatggtggtgaatctccctttagacttcatgtatgtgctcacttatataattaaagtgattcacatgtactatataggatgttgaattccctgcataatatgaatgaatattaaacataagaatctgttgaaataccattaatatttataactgatctgtgagactaagggaattctttagtataatatatttcaaattcatagttttaataatgtagcatccttgaaattaaaatatagattcttactcactgaaatgtgtttctattctacgtattactagtgaatcatttgctgctgttgtttcatgtccttaccctacttagcagggtcaggaaggtcatttgaaacctgaggtcaattgagcctaattctctgttttattaaaatcaaaattactgtttgtttccttttccccttattttcataatagtggcttctcagggttgaagaatttttttctttgattcatgcccaagtacccagatataatctttaatacgttttaagtcaaaatgtaagagggaggataatcccatccatcctattagaaaaggagataagaacgtccaccctggcctgggttgatttcctctgcaaagggggacagggacatcagagcactagcttaaatatatcaccatctgattggcctcagattttaaaattcaaaattttatgacatcaaagcaaaatcttcactgtaatgaatcaaatgaactaaagcaaatcttttggtcaactctatccaagagctatatgtcatccttttgcagagtccttttgaacagtgaaagatctaaagccgagcccaaccatgaaactaatacagtgacaccatgctattctcggaggcaaaccagttcactgactcaaggaggaaatcttgcctgattcaggaaaagaaacagaacaatcataacatgacttaccacacaaaattccatataggacatagtgctgagtaggacagaatatcactgcacaatgagaggtgacttcatagcatcgctaagtattgaggaagatggagcattttagttgactgtcatcatagaaaacctgggcttttgtacacactgtgaaaagagaaccccagctaattagagcctaaaatccaaaagtgagctcgaataagccctctgccctagggacctgagaaggtccagttaaaagactattgcaaacttcttgtttttccttttggcagcgcaagtaaaagctgtaacgggctgaaaatctcctgttgtcccaggataaatagatgttttcataaagcttgggaggtcttagccaaagtacaaaacttctcttaaacagacccagaaatgtatacaatctgactaaatgtggttttttaaaaaatgagcagaatctatggaagttttcaaggaattgatcctagaaaaaaatattccagccatggacaaaggtagaaattataaatatttctgaaaattgctttatttttattttaagacccccaactgttcttccatgctacctacaaacagccctatacttggtccctttccagtctttaattctagcacttggaaggcagaggcaggtggagctctgtgagtttggggcaagcctgatctacagagctagttccaggacagccaagactatacaaagaaaccctgtcttgagaaataaaaaggagggggggggggagttgagcacaaagatgcagtcttcacaccgtcttgacttccctgccagtgtcccttggaatgtgagtcaaagtaagcccttcttcccttcagtttgttttgttgggatattttatcacagctacagagggtagctaggataataatatatgtgtacctatgattcagccttgcatccacttatagtgacttgagttgatgctttacatccagtatgttctccatagcatgtgagtcaacttctagttaattatgaaattcaaagaatgagagagaaaaacaaaaagatgctacttggttatctcagatatgaagtataaaagtcattccttgaggtccattcttcctcaaaatacatcttttttctccattttttatttaaattagaaacaagattgttttacatgttaataccggtttcctctcccgcccctcctccccttcccctgactaacaccctacctatcccataccctttctgctccccaaggggggagtgagtcttccatgggggttcttcagagtctgtcatatcctttggtatagaacctagaccctcccccatgtgtctaggctcagggagtatccctctatatggaatgggctcccaaagtccattcctatgctagggataagtactgatctactacaagaggccccatagatttctgaggcctcctcactgacacccacattcatggggtctggatcagttccatgctggtttcccaatgatcagtctgggagccaagagctcccacttgttcaggtcagctgttcctgttgtttcaccagcctggtcttgtccactttgctcatcactcctccttctctgcaactggattccagttcaattcagtgtttagctgtggatatctgctcctacttccatcagttgctgggtgaaggctctaggatggcatataagtcagtcatccatctcattatcaggggagggaatttaaggtagcctctccactgttgcttagatgctaagttagtgtcatccttgtagatctctgtacatttccctagtgcccgaattctctgtaaacctatactggctccctctctgatctatttgctctcctctgttcttccccctacacaaccttcctgctccctcatgtcctcctcactcctcctcttctccccttctaaaagattaccagcctacaatccacaccactagagaagttaggcaacaaggaggactctaagagagacatatatggtcccccggagaaggggaaagtgacaagatctccaaattgggagcatgtggggaggggagagggagctaggaaaatacatcatttttaaagttgtgttgttacgataaatctttctgccaaaatccgcctgagccccaccgccccaccgccacgtgtgagctttacgccagccacctgcctgagttaggcccaaatgaatacacagacagacttgtattagttataaagctgcttggccaatgactgggagtctcatctgttagctcagtctcaattatcataaacctatatattttataagacttatcttatcggatgccttattggcgtccctcctagctggcggatcacatcgtgccactggaacaggagccgaggggaaaagagggcccttcctgtttctcctttgcttaaatatgagtctccttgctatgtcacttcctgcctggatcagcacttctctactacatttcccagaatcctctttgactcctagtcctgtctacttgctgtctcattggccaaacagtattttatttaacaatgaaaaagataaacatacacagaagtacttcccccatcattgtgtgcttgaatactagtcagagtaattgatgggcatttcccaaaattttaaaattatacaaaggccttgggagttagaaccctgagtgaggtttatgtattctgatagaggctgggcgaaactgctccagctggttctctgccactgaaatataagcccagaaaattggggtgagtggaagtaagaagcagataattcaaccactttcatcagtcttggcctaggtggaaagcacttttctcctcctcatagtccactgatcaaaagatggctccaacttactaccaaatagagggaactgcgcctagaacatgggattgtttaataaagtttgcatcttctggaagatgcaaaaattagtctaaagatacttccaagtcttaaacaaaattggctattagagggtactgtaaacccatatattggcttagtattggttatatattagattattagtgtcttactctcacaaaactctcatatccttttctacaaagacctttaatataatagagcaaaattatcattttaaattttattccatgttatgaccatggtttattatgtgggctataacaatctaattattttttaaagaattatatgtcattttttaagttaaacatcagcatccataagccattagagaaattctctttataagaataggaatctgtgtgggtttttgttgttgttgttgtttttgttgttgagttttttgttttgttttgttttttgacatggtttctctgtgtagctttggagcctatcctggcactcactatgtagatcaggctggcctcgaactcacagagatctgcctgcctctgcctcacaagtgctgggattaaagatgtacacagccactgcccagctatgtttgtgttcttttagtgacacacttcctataacaaggctatacccaccaggttgtggtgacgcatgcctttaagcccagcactcgggaggcagagggaggcagatctctgttagttcaagaccagcctggtctacaagagctagttccaggacaacctccaaagccacagagaaaacctgtctcaaaaccaccccacacacacacaaaaaaaaaataaggttatacccaacaaagccacactcctacttgcaatgagctcatgggggctagttacattcaaattaccaaaaaaccacagacaccaatgttctttctaatttcacttgctccctccacccttccctcagatttagaattcatcacacatatatgcttattgagtctttattactctgtggctataggctggaccttgttctgggtgtctaagtgcaaaagatagccaagattctatactgctagtgcttatatttaacaaggaacatttgggtatatccctatttagagatttaaaaactcaaattccatgtaaacctaatcctaataatatcccatctgattttcccttttattttgatagaattttgagaatatatattttaaattctatacaatgaaatgtttgtggaatcaaagtaacaatgtctcaatgaagcattctctttttgaaaaacacaaagatggaggagattcctctgttgttaagatgcttgccttgaaagtatgaagacctgagtttgatccccagaaaccacctttagaaaaactatttgtatgtggttgtatgcacttgtaatcctagtgctgagtctacatggaaaggcaaatcctagtttctggccccttgagaccctgtctcaaaatttcaaggttgagagtacctaaggaataacaccaatgctggcatctggaccccacatgcctgcacacagactcatgtgcccaagcacaacacacacacacacacacacacacacacacacacacacacacacacttacacagagagagagagatgttgctcactctttattcatagtcattatcttattagaattagtctctgaaccaatcagcgtgctaagctttttagatgctttatttcatttaatccttataacagctctattattattattattattattattattattattattattattattattattgagaaagctaaagtaaagaaataaagttaaaacactacatcagcttgagctttgtctccagtatattcttttctggtaaagataaaaattttgtcccatagtacctaatgaaaactccccatggaggcttaatgccccaccacctaccctatagcatactgagattaactaaaatatagaaactggacacttctctttaatatttctctaatctctattttctatcatttgtttaatgaaaatgtgaattttaaagctcattccctaaatgatcaatgtatgacactgtcttagttagggtttctattgttgtgaagagacaccatgattatggcaactcttataaaggaaaacatttaattgaggtgatggcttacagtttcagaggtttaatccattatcatcatggcgggacatgctggcatgcaggcagacatgttactggagaaatctacaccttacaggaaaacggaagtcatttaagacactgagtggtatcctgagcatggaagcctcaaagcccactccaccagtgacatacttcctctaataaggccatacccactccaacaagccacacctcactacgtgcttaagagggctaattacattcaaactaccaaaccaccacagacaccagttttctttgtaatcacttgctccttccacccttctctcagatttgggttcatcaaatactcagtacacacctctgttactaccgtcttatcccagtctcatcaccatcccagaatggagagccctggaaatgaagattctagaagcctaagttctcctatgaattacactgggcttcatgacacaaatcatgaaaagaatttgttattcaaactctcaagaggcccagaattccctcacacaaaaccacttaaaccttaatatatatgacgtagagtaatatttttagaagtaaatttgaatttacctgtgtaaatcttcaaaaattaaacggtccccaatcctgtgtgtactaattaagttattgtttttatgcatggctttacatagaactgtgatacttgtgaattttttattaattttagcacataaatcaagtatctatagtttatcaacaactatcctaggtaattaaagtgctggaaataaaccaaggactgcagaaataatgtagtgcttttcccaccatactgcaaagtagttcatttgatctcagaagtgttcttcaggttaagatgaaagccacaaggaaaactcaaggactgagagagcttagatgaaagcattttcatcatgttgtccccatggaccagaagtctccaccctggggacatcatagagcagtcagaaaaaagataagtttccctgctcaaaactgtcatcacagatggagcctcattaaacttgtgtgtgtgtgtgtgtgtgtgtgtgtgtgtgtgtgtgtgtgtgtgtgtgtgtgtgtcgcgtgcgcgatagtgcatatgcatttcactggcatagatgttatatggtactgagttacataaaacattttcataaaagtatacaatatgctttgtgcttatcctcctgtacttcatcacctccccttttcttaatatccatgcctcttagtcccccttattccctagacagtttcaattctactttattgcaatattacatatactgttttatgtatctatataaaatccaagaccaacaagagaaagcatgaaacatctgtccttctgaggctgactcgatttacttaatatgattatccctggttgcatctattttcctacaaatatctctttattactgaaaataatccacatgtctactaacagagcaatagataaagaaactgcagacctcatttcagagacttctagaaagttagagccgaaggcatcttaagagactgggctgctttttaaatccctttactttacacatgaagaaaatgaggcccagaagaggaagtctcaggcttcctcaagaaaaccttcagatctaatacaatgtgctaaaaaacataaataaaaatcagaccaagaggggatgttactggagattacagggtctcttcaagagcgggccattagtctcacagatgaaagaagttgaaattgccttagaaggaaactcaaggataattttattggaatgtgagagagaaaacaatgtgacaaactaggtctctcagcagctactgggaggagaaaagtggacaaggggaaaggagaaagcagtgctgccagggatagaggagacaatcagacccagcagtgaacatctgggcggtgcagagacctgtgatctcaagagagagaatgtctagcatgtcaggaccagtaggtgtaggactttggccatgtctaaaaagggagacacaatgagggaaaggaaaaggttatgctttctatagtagaaaacaaaaaacgtccaagcttagcagtgagttctgtaagcaactattgaatgccttgatcttatatcttatatcatgggtgtcatgtgacactacccctgaggtgatgtgaacaaaagtctactcaccaaagataagggaaaatgtcaaatcaaagtaaggatgccactaaagtccaactgggtggaccaatgagtttcatttagggttacttaaggaaatgggtaaaatgttacttaaggagcagaaatggttcaaggcagttgtgtcaccaaaagccttccccagaataggtgacagctcacaagagctgtagctcacaacttgcaggtagttcaacaggttataaagtgtctcctccaggcagctcagtctatctgagcctctgctggacaactcagctgatttgagggtgcctctcatcagtcctgactgcctgcatggtgtatctgatcagtttcagggacttcctgaagtttttgaattgtttgctttctgatttttaagaaacttcctacagaatggaatgaataaatgttctgttccctttagaacattttgggtcttaaagaacttccccctgagatagaatgttttatctccaacaaattgctactcagcaatagagcttgcagatgtccagttatctgtagaaaatcatccccagtgttccaacccagcccctatatccattctcctgctcctttaccacacctttctccagcactcacagatgtaatggaaatagtatgtttattattccaggaggctgaattaccggagaatgttgccatttacttttttagctggttacactctctgtggatctttttccattatttactgtaaaattgtttcccaattttgtgtacattttcttacatgagcacttcaggaaaacttcttctcaaactggaagtctgaactttatttcatttcatcgtgtggggttttccaacatgtttatagttaaccaaatgcccatcagaatgattgccgtatacagagctgtttagaggatatccatgtgccttgttaaacataatctatccaaacatatgtagctttggataacaaatatacatgtgccttagtttaaaaactccccttgtggaagcctttatttaaattggccagtgcatacatctacagatttgttagtgtttgctgacctagaataaacaagttaaagatccttaaaaaaaatttttacagaagagaaattagtaggtatgctagcttttggaatatatatatattccatggatatattttggaatatatatatatatatatatatatatatatatatatatatccatgtagcaacagttaatgaaaaagaggccatgaatttgaaagacagcaaacttggtagggtttggagagatgaaaaggaagtagaaaatggtgtaatttgcattgcagttttttaaaagctgatctttccttcccagtgatggaaaagctcctgagggccatgtgtggcacagggcctgtgactgtttggctgcaagcatttggtgctatggactgaactcagtgttgccgatctgtactgattactcggtagatggagaaagtttgctttatctatccatactccatagaagatgagagctgaattaccccttcttcattcattgattatctatgcagtcaacaaattttgctacatcctgatataggtatcagaaatagaaaatataaaccataaaatatcaatgtaaaacaacaacgaaaattctcaaacataaaagaaatgaaaagcactgaaccaaagatcgacccagtttatgaagaactttctttaattacagaaaattaactcctggtgaggtctggatgttggtgaaggacactgagtaaactccaccacagaccccaggtgaagttcctccagacagttgtaatctgtattaccaccgcatcccactcccttagcacgtgaacctcgatttacaaactcctaaatccaatgggtcacctttatgtgaagaattgtttagaacagctggatcccacagattggtgcaccagccttcctgagtattctgcatgtgggagcttatgctctaagtgtgcaaatcactgccagatgtgacatgttttaaaaacaggtgtttcgatacttttgctatacaaaaataatctttagagggaatttaaagatgattgtgtgtcttcgggtttttattgctgtgaagagacaccatgaccatggcaactcttataaaggaaaacatttaattgggatggcttgcttacagttcagaggttcagtccattatcaccacggtgggacgcgaggtggcttgcagacagacatggtgctggagaagtacctgggagtcctatatcttgcaggtaataggaagttgtctgagacactgggcagtatcttgagtgtctatgagaccccaagtctctctccacagtgacacacttcctccaacaagaccacacctactccaacaagaccacagcccctaggagtaccactccacttgggagacattttctttcaagccatcccattgtgagtgctttatttcaatataaattgttaaaaattttacctagttattaccttagatgaactaattgattatgtaacttaaaatgctaagatgttattttagtgatttgtaatttattcctttgggacaggaaatataaatatatgaatggaaaactatatagaaaaagttgcaagatgttttgggaggctggacattacccttgtacattgttgagctgtggatagattcgtgttgtattaagtcccaattgccaagtgcaaccaactcaattaaatgaagacttcaactacaataccaacaaaaaatgtaaaacaaatagggcctgacctgtaaactcatgtacttctcagtctacagaaaagacaaatagatattttcacacaatgcaataaacgttgtcggagaataccttctccttatatttatcagtgcccagtatgaagtaaggaatgatcaataccacctcagtaattccagttctctgaaatgaagagagtccagcttgataaagcggggctgttgtttgttcatttattcatttgttttgagcatttactttgtgactaaccccaaacttctcactttacatggttttaatctgcacagtaaccctggactttgtcaccaagacacaaaaaagatagatcactgggggaaagtgtgcaacttcagttcacatgtgaaaacactattcagaagtaaccagctgaactataactaaaataaatgcaccaggcatgtgagcaagaggactaagactaggaagaatgtggcaacatggagagttccaatgtgaaggaagtcagccagctgtgtctgaatacttctaatgtttctttttaaactttctctactttttattcatttgtttggttgtctgtctgtgtatcatgtgcctggtgatacttgaacttgagttacaggtttcttagaattgttggttgccatgcagatgatgggaaccgaactcaggtcctctgggaaagcagccagtgttcttaaccactgagccatctctccaatcccagtgtgtttactattccttgattcaacaattctccttctagggaatttgccggacaggtagctaaacaaaagtacaagaaagagataggaattagtttattttgactcctgtgacaaactgtcctagatttgcacatgatttattaataacaaattgcttctagttgtgcaggctgagaagtgtgagatcaagacacaagacacttgaatatgtgacaatgactcacttcccatctagacactgtcatatctcctcattctcattcctttataagggcactgaggccactcacaggctctgctctgtgacctcttcaccccactacagtcacacctcccaataccaccatgctggagtttagatttcagtgtacaaattttgggacagacattcagtctctggaagaataaacatgttcattacaaaactgtttgtaagagtatcaagctgtgaaaaaaaatgtccatctgtaaaagattaaaatagtaaactctggtaatcccaatattattaaactacatagatggcaatgaactgataggaagttctgtaatatttttaaagtatacaaatccagttcaaaaaccatcgctttagctggcttaatttccactttaatactatgagtaagtattcaggctcaagtgtagaatagttctgaaagggaacctgaggaaccactgagaagcatagctattattggataatggagctgtcaggtcttgagacagaaagtgacttaccgcttttccctattgaccatatttggataacttttcatagtgttatcacttagacaaaagcagtttaaaaacaaagtcaatcctatcctatcttcttgtactcacaatcttattagacactttgatttgcttaacaatgtcatttcaaaaatatgtctgcctaaacaattttgctgttgttttctctagtatcagtgcataatattgaatacccagttggagacacagaaacatcatggccagctgagtcactctgccaacgaatgtggaaacaattatttctaatgcagtttcaactaatgtccctcagatctggacagaggaaagaaggacccaaggtgtctatgctaaatgaaccatatattatttcttaagatagaagactatttgatatgtgaagcaagcttgtttctaatttgaactaatacaaaaaagaggaaaaaaagatagaagactatagttaaggattttctgtaagtcttagatggtatggcatagtttcctactaaatgttagatacaaacttctttaggaaagggagcaaaatgccagtaaatgccagctgtatttcctgtaatttaaaagactgccatttcaagtcttatcatttcccctttcatgatattttatctttaaaacatctttaggcattttatctttaaaagagaagtaaagatttctcaagtaatcttcgtgtctgattgcctgctgacaagaatgtgatttccctattcatttatgttaaaattgtttggggagccattttctttctcctatcacttctttggaaattgtgacatttgtctcccaaatgaagctgcccactcctctctcttcttctgtttttactggacatttaaacttacttaattaattaattaattaattaattaattaatcagctgttactgattaatatgaacagattctacctctagagaagcaacatggaaggaaacaatcactattttctcccaaaagatagtggaacaaaatgaaacaggtaaagaggaagcccgtgaagccatcttctctatgcctagtccttcagagaagtgcttattccctgaacttaacacttctgttaaaaccatgagcttatgtcggattgatataaatacttgccatagaaatccctgcagtagacaaagttggaagcactgaacttgtctgggacatgacttagggagagtgagccaaattttagtatttggttgatactttttaaagtaaataaaccatggaagtgttccctctgttcctgatttggaccaacagtaggcacagaacaacagcatgttgccaaggtacaggatgccaagagagaatgctatatgcacattattttggcctgctgggaaagtgaggaaggagagagagagagagaggcctcagaacatgtgtcagtctgctggagtccctgtctttctcctcctcccccaccaccatcattctctcatcaaatagaaaatagagcttaagtggagtttacagatatgattggcttcctctctgttagagttggtgctgggtccctgggttgaatagaagagagctgcattgttaagaaaagcacttccagcaagaggatgaggatggctgacagttccactcgagtggcgagagggaaaattaccaatgtgtgactcttggcttgctttgtagtgcttcagacaagttcacacagatgtttttcccaagccatatacactcataccaccaatgcaattccatttggtgcataacagttctgcaacaacgctgtacatgggttgtctcttcatcaccgaaatgtatcctcctgcatgcctctcccatgtgtcttatgctgccagacactgtactgaacacacatgtgcccatctgcttttaccagtgaaaaaagagagtcattttcacctatttccttttcccttggtccacagctatgtctgctgttccctaattggctctagtcctctgcttgtctctcagacgtgaaattcagagctggcttttggggaacccaatttctgtcccttgccattgacaaaaaaataaaatctaccagataaaaaaaaaatctttgattcatttgcatgtgaatgagaatttcagcttttagtgcaaagagagaaaatgtggggacaggaatcctgtgggacctaagaatgaacatgccacatagatttcagaacagggaatcagcaatgacaaggagtagaaagagactgtagggttattttcccatgcatccagtttccaggtaatagtaaatgctctctttcacatccctttgggtttctatgactacattatagcatcaatacaggctgggagctagccattctcattaactgactattattaccaaataataccaagccttttaattattgtggcttgtataacatatttaaacatcacaaagtcttcatttgatttttttcagaaaagaaaaatcatatgctatcattattaaattttccctttaggcctagttgtcaacacccaagtgatattatagaattaattcatttgttttctgaataactgtccttaaatatagagaaatcatcttattattgagatgttttagtcagtttttatgtagttcgcttttttaatcagataattttcccttcttacttataagttacttgttcatttttatcttattgcaatgaccagagcaatgttaaatactattgttgtttcaaaaatctttgtttttaatgttaccatgagtctacattatttcattttaaaattcaattaaaaagtaaacaaaaattctatctcattttgataaagtctactctttcatgttctcttgtatttctcataaatttctattaaatggcaatgaatatctccattgaaattgaaatcatcacacttcagttaattgtacctatcaacatgatatattatggtagataagtcattggaaaatctgtgtggttcttgatgcaatttgttcagccttggtgatctcactctaggcaagaactctgctactgaacaatacactcatcttaatgagagacagagtctggtttagtctcctggacctgccttgaacttccaggctttctgcttcagcctcctgcctgacttgtgaacatcatgaattttccctatagtcctatggaaggatggtctatattttggtacatgtacttagatctgtaaatgtggtatatgtggtgtgggtgtgcatgaaatcaacattttgtcactggaaataaaaattaccagtaaaacagcaggtcctgaagttggggtcagggttttcctcttaattaacatagtgtctgtgttttcagtttcctttgtgtttcttggttggcattcattttcttttggctgaataggttttgatatgatttcttttccatagcaattgctttctttattttgtgatttaaaggcttctagcttgagtcctccacttttaggtctttaagagtttctctgtatctgatatgtgctgtctgtcagaacaacacagctgcaatgtgtgcctgtcttcaagtagaatggaaaaacacaggaaaagaaagaaagaaagaaaggaaggaaggaaggaaggaaggaaggaaggaaggaaggaaggaagaaaaaaagaaagaaagaaagaaaagtcttccctgagatgccaaaaccacagatttacccacaggcagatttggtgccagaattcattctgccagcatacttcataaatctagttaacatggtcatagacagtattacccacagttatctagcagagataaaagattgtgaaggaatgctttaagctcagacctcaaagaaattgtaagataaaattcctaggaacctccatcaaaatgatatgtgtgtgaatgtgtgtatacataacatgtaaacatggaagtatatattacatataggtccattaaagcatacaaagacatacacctccttggtcagtagtcatccaaaataattttaatttatttaattatttaaattataattttaaattataaccaattttataaaacctgaacatgtaggaatagcctatcctatgatataaaataacctattaaatatgcttaaagaaatgaaagagcactagtggtatgcctgaggagaaagagactgacaaaattgatcatggagattcaaaaggactcaaataaaatttttgccaatgaaaagtagtgtaagtttgaaactcaaagcacaaattaaacacaaaaataaacagatatggggaaactggtgaactgatgaataaatcagaagcaaaatatatttagaacttagcatagagagatcaaaataggacagatttaaaatagaagacatgaggatgggatgagggtctcaaatgtatttagttggattcccatgagaatcaaataggaaggacaagaagaagaaaacactgggataagcagaagctgaagataaagctgaggctttgtgttctgaaaacccaatgagttcacagaaaagtaagcaaaattcaaacttctggagatctgaggcaaactgcaaaacaaggccataaaagaaaaattacatgcaatggcctgaagtcaaattaaagattgatttctagaagctaacctacactggaatcatctttaaaagaatagtgacaacactgtgtttattgttatatgccaacaaaactcatatttcacaaatgaggatggtgactgttctgtgaaatcagaacctgggagtgattaccttcagggggtggggcatcatttaaggaactttaaaataagatactttggaaagagaaaataagcctcatgggagatctgctatacaccaaagaagcttggatgaatatgaacgagctggtggtggtggacgaagctaaagagtaaaactaatcctggatgatgggaacacacaaactagagctgagctcaagtattatggattctgatatcattcagaaaagggtaaatatggatgttgccttgcttttgactttaaagataatatgtgtaccaatatcttttgcagttgtaaataaacatgtaaacttccaaactaggggaaaatagaataaataagactatggaagacattggttaatttataaaaaaagaggtattgctgcacaaatgtgaggccctaaggtcacatccccagcacccacacctgatgccgagtacttctgcacacaccagcaattgcagtgctgagaggtgagacagctggacctgggagcttgctgcctgaccagtcaggccacctgatgtgttccaggtttaaggaaagactgtgtctcaaaaactaaggtgtcagtgattgcaaaacaccctgccatccacatcttgtctccacacgtgtgcgcgtgtgttcatgtgcacacacacacacacacacacacacacacacacacatgctcacacacaatgctcacacacacacatgctcacacctactcccaaactaacacatacactctcacaccacacacaaaaaagtaaaaaaaaaaaaaatgcataacaagataacctttatagaattttcaaacagcaacccacactgaaaaaaaaactgaaatacaaagaaaaagtaagatttcaactcaaaaacagtaaactcatggccatcaagccagacctatatggcaaaattccgagagagtgagagaacccaactccagtaaaaggtggaaaggtaacacatacagagttttatgagaacgaaagtagttacaatcatctgacagatggcagggctcctaaaaatcaagaggtcagatattgcttgtaaggtaaaattgctacttacagatagccttagatgattcaactccagtgagttggttgcaagactatcattttctttgaacaagacaatagttgctggatggagggtttactgaacagacccaggattccttaccagagtcttttacaattgtgtcactgtaggtcaaaggtgacagcctaccatcctgggcaagctaagttgtattgaagatggcaaccttgaaatccccatgacacaagttgcatacagaaagggttttatttctgccttcctgactagcactgatctctgtcttttcccatgtgttttttgtttgttttgttttttaatattcaagaactcaagtctcttacccctcattcaattaatatctttccaaataagaaatctgaggcactatcatgcactaattttcttaggtacctttaaaaacgttcaaaggcttaaccaagagatttaaccaagagctcatcttgttcagactctcactgtagggatctctattacgatagcctacaaatggaaagctaaatgtttttatcgcttttgcaagacaactctttcatttaggcagaacttggcaattagaattataagcagaaccatgttttcaatcaaaaattatttgctttcttgggttcttagtgttatcattaggctttcctattgatgttgaagtactttctttcatctagcaaactaaaaaggcagaagacacctagagaccaacacccaagattgttttgaccacacatgtacatgtatgaccacatgtgcacaaacacatacatacacaaaagctaattgaacagcccaaaatcaatgaggtcatttgacagattttaatgcaacatctagatcacattttaccaacacaattcagttcaaattttgctttctgtattaactttttaagtagcttgcaaaccaaaggtgtcatcatgataatgccacatatatgtatcactgcatagcttttgttggccctgttactgccttctccatcctatctcctccattttttctagttccctgtcttaccaagcaaaagtcccttttatacattctagtaacatatacatatatgtgtttacccatgtctacagtctgtgtgtgaaagaaaacgtgatattttgtcttttcctccattgccatctcttgtctctcccctttagtcctaactcctagtaacacatttgttgttctttctgatttcctgttcccacatcttggttgtgtttaaactccagttgactctttgtattttctcttttcactttaacttctaaaagtgctttttagtttggagattggaatcattttttaaaacttcttctttagtctcaattttaatataaattctcaaaatttgttcatttccaagaacaaaaagtaaccaggctattctctgtactctcatttttatgcaagaagcatttcaatttgagtttaagattcctttttgtattgctctcctgctagaagatgactattgtaaacaagcaaaacttgtcatgtaccattactagtcttcgtgactggaagagagcacctcatgatgctcagtgcatatctggcatttgggtccctttaaagcctgcaaggaggactctcttctcctgcttcccaacactgatgaggtaactttctgtctccggaaagatttggtaccacataatggagaatggcattgtacccctccactgtgaacaggcttcatgagttttttaactgatatataataaatttattaactgacatgtaaataacacatgctatcttaggttttttttcctgttgttgtgataaaatgccgtagcaaatgaacttaaataagggaggggttattttggctcacagttcggggtgcagtccatcatagtggggaagtcatggaagcagggatttaatcagctggtcacactgcatcagcagcagaaagcaaagaacagtaaccacaggtgcacagacagctctcacgttttaacccatcaaaccgcaaaggcagcatgacaaaggtttcttattgtggaaacgttccctgaaagaattgcagttttgcactaatgagtctttccctctgtgcaggatcagtgaagtctacactcacaggataaagactcagcatgcccaaggagtcttctccgttgcttggttaggttgtccgagttccagtgaggcgaatggtgaatgaacggtggataatctgattccccgttgaagcacagtatcccctctggtcatatcccaacctcacacatgcgatgcatgtgtgggaattgatggaaacactcattgtgctctgaaggcctgtagcattttgagactatttcttgtgattatcttttaaaatccctcagccagaattccttgagctgagtgaaatgggaaaatgaagtacctttattaagaaataattcaaggttataatttgagcaacacctaggaatgttgccttttaagctgatttattgccttcatcctgtatcttacttgaagcatctactttgtatattgttttattacattatcagcctaggtgggtacaagcttaaaaaattaaatctcttaaatgtagagagaccagctgggtatatgccaagtgatctgcttgtgccattcaaccttttatttttgtatgtaaaattgaaccaatgtatctcaaagagtatgacctcttataatataaaggtagaaacatttagaatcaagctgccaatccatcagcgccatactacataaatttattcttcctaactttctcgtcaatattatttaaaccaaactcattttaacattctttccaagattatattttctaatgcctcggtttcctaaatgtctttaatttcatgctttattaattaccttatgttcttctaaatacaggcgcgcatacatttttgtgatcatgaaaatacagcaaaaacaaattcagtgacaagtaaaaatgggaagttatagatgggacagacttttacttcttttgtcaactaaaagataaagtctagtggcacaactatactcttgccacttaagagggggaaggggatgatctcaagttgaaggctagcctgggctacataacacaaccttgtctcacaaaggatacaagaaataacattaggaggaaaattcttatttcaaagagataattttttcaaggtgttaaacataatgtataatagttataattttagtaaaatattttccagtcttcctaacataaacatatttctgaacatccatttcattcccagaacttaagaaaatagaacatacacaatatataaaaggcttacaatttgataataagagtagtaaaaaataccaatgattttaactgtacccagagcaggaggttcttgtcgtctcttcaagtttcatagaaagacctgaaatcttgctttctaaagcagcgtgtcttccacctcccttcctccctagaagagctaaagctgcttcagaaacagcctcatgtatgctggagccatcagtctgtttttcctttggttattttgatcactttctaacttcagactcaaacactaggctgtgcctccaggttccccactttaagacgcatctctttttcctctcacactacagagtcatcagaatttggtccatccctggtgatccacaccactgtcccattcggagttacacacatggagcacagggaggaagatgtgcagcagataatcagccagcaactggaaaccattctgccgggtttgcctcagccggttgctaccaaatgccagaagtggaggtattcacaggtaatcagagaagatagtgggaaagcctgggcgttttccggcacagctagcagaactgatgtcactttgtattcttcaccattctctagtaggagaaatgaatgatggcatcttggaagttgatgtcggtttgtcagacacacacgtaatttctgtaggtgccattgtcctgctatttctcaatgagatgttcatgtcacttctaccagttttttccacgtcccagcgcaccctgaaattctggggtttcctacgaaggcaagacaggctgtatatcctaaaggagctgtttctctggggggtttccgaattgacactgtgtccgtgtggtagcccctttatctacctggatttctgcagtatgtcacatcagcattgtgtgcagagttagttgccagcattttcttttttactgagtttttacttcagtttgagtagtgacagcagagatctttcatgagtaactctagaatactgaactgagctgccttccagggtaagcttatcattcttctaggtcagccttaaagctcttaatgcagagtaaatcttgacttaaacgcacaaacactttttactggagttggaatactgttctcggaaatgtctttgggtctgtaaactcgttgtgaagtcatgtgggggccaactaagcaaaggtcggattgagtgaagatgaaaagctgcagagacctgtgttttccccctagggtttctgagcccattgatgaacagatttgtgagcactattggttatccaagctgtaagaccttcagaaaaaaaaaagtggtgttatgggaaatcgcagcagattttgtatgttttaacgggccatccaaattagaggaaatagtaaattactcactaaaatattgcagcaggtctgtgtttacccgtatctgctcaagttaaattatacagtgaacctttggggaaaatatttacttaagcatgtcatagtcactttagaagactttgctctttccttttaagagcattgaaaaatctcaatagctagtgtctctaaatgatggttaactcaattttaggttgacttgaaaaagaagccagggaaagaaccttgtgataatttgaaactgagtgtattgaactatattgtggtaatttgaagctggtatattgtacttaagtcattttgcctattgtaaatactgtagcacaaaaaattaaaagacccagagacagatattggggttcaaacttcaagctgaagatcagaaaacaaaccagccaggcactagctcttacctctacctcagactgaaaggcaatcctggctccaccaaaccttagactgcaatcccagactgccatactgtcctcaacatggctagaaatcctgagactgaatgtgactggagaatgaatgccagctctgagacccggttcctatcttaaatacctccacaatgttgggattaaaggcatgtgatctcagcacttgggatcaaaggcatgagctctgttactcttcactctagtgtagactatggtggccttcaactaacagagattggtctaatcctcttaatcctgactcctgggattaaaggtgtgtaccaccactgcctgatctctgtagcttgaggttgcctttgctttctgagtccttaggcaagcattcatgaatcatgaataatgaatcaccacaaaatacacctttaaaagaagagtagtttgtcaagtttcttcttgtgtttttctcataaacaatttactagtagacaaaaacatagtttgtgaatctactcatttcttataattcataatattctaaaattaaccttgtcctaaccataaaaaacgttgtacaatatcacaaaagttaatcaaatttaatcaagagattattttgaacacaatgcatatcccaaactctagcaatggttttaattgtaatttaaatgttgtaatcattccactgcatttacaactctgtagacttggaagctatactggctgcaaagcctgcaaggagacaagctattattcaggctttaatgcctgcatttccattgttcatacacttctctagggtcttgaatagcaatctacaaagagtaacattgttatccgtggtgaacttctcacctatacacattagaaaaaaggaatggccaatgaaaggtcaagcaacttgaaataatttacttacttttaggtattcttctcaaacagtatgtccccagtgcttctcaatggtccatcttaacctctgggatttgacagaaaagtgtgtgccctctaagccttgccatcatggtacaagtggccttgcttcaaccaatcagcattcatttgtgtgaaaagttggacataatacagtattaaactgataagaagaagaatgtaaaatagaggcacacaaaagaagaacaagggggctacattttcagtgccctctcccccatgttctgagcagagacagagcttttgaggaggaaaccccaccatttctgttttgactaggtcctaccatgttccttctccttgtctctcctcccttgccttccttctgttctccactcatctcattccttttcttctctttctccaagaaacaaaatgccagagccctcctcacctttatattatggaagtttctgtagactatagagctagaatctctgtcccaaacagtgctaggtaatgtggattccctattctagagcctgcaggatccacactttctctccatcaatttcttttcttccttttctcctcttttgaactgtatcttggcactaagttccaggaaggggtagagggactgggctcaaagctgggtaactcaaagatatgatcttatttaatgtcagaagttgacacacaattggaatagccaaaatgtaaaagcttgataacatataacactagtgagggcagagcagcagtaactctcactcatgacttgtgggaatacaaactagtagagtcataagtagacatgtcagtagctccttagaaagccagacagttgggaaaaatggaaaaactggctaggctagcaaagatttttcaggtattggaaatattctgactctataatagtaaattacattacatatttgtcctaatccataaatatacaatattgaagatgaatcctaatataagcgatagagttggagtattttattttcctcattgttatgacaaaataccaatataaaaacagtttaaagaaaggacaggggcttgggaggtaggatcatggtttgaggaacagtacagtagagatggctacaggagcataagccaaataatacgttcctgcagtcagagagcagaaagaatgaatactgattctcagaactctttctctttaccctcttaattcaattaagaacctcagccactgtgaaacttctacccacatttagggtgtgtcttctctgcttaaacatctccggtaacactttcacaggcacacacaaagatgtatctcttaggcaattctaagtcaagacaatgaaagaccaaccatcatgggatgataggacatgtgaatttagattcattaatttcattagctcacagatctaaaagctaacagacaaaacagcattgtactggtccccgtgaaggccccattggctaagtcaccccatggtgcatcatagtaacaagagagagcaagcatgagagatgacctggggatggggatgcatgaagccagaatcagagttgggggagctcaattatgacaatgactctcacaagaaggagctcagagtccaacaactatccccaaccacccacccggctcccactgaactccatctcctaaatgtcctaatgctgccacacaaggaacatagcttccagcagcatgaatccctgaaagacacccagaaactatatccacaccaaaacatttaccttaaaaagtacccataagaataatacatatacatattttaaaaatccatcatcaaaccccaaataagtcatataaacacattgtgctttaaaagattcttgagcctgctagtgttatcccactgtaatcgtgagaaaacaaagggtcagggaggaaaaattaacttccttatgctcccatggataataatggcatcgtggaccatagattcatcaaaatactcctcccttttgggcagctaatcattcacaggttcgaaagattacgatgtgaacatctttggtaagggctttatttctttcagtcacaccatctttcctctggttcctctggcggatccttctaaggtcccacataaaatcttaagggaaagcattggcacttccaggctccagctgctatcttaaagaaattggggggggggtatttgtacatggggagcagtttctcattttcctgttgttctccaggcccatttccatctccagcgcatgttcacttgcctatcccataaagaacgccttcaacatcaccagtttcccttccgaaaccagagagaccagtgtctgctgaggctctaagactctaaattgaattttgtcttaaacaacatagtggtacatttttgcgggtgctgcaaatgaagggaaaaaatgtgtttggacaagttggcaactgttccgatggttctcatctagggtttggataaaattcctcagcttctgggtttgggtttaacttaagagagcagtggcagattttctaaaatgcttctcatttcttccattcacatcaatttcccctccataatttcagtgtttatccagttaatgtaatttggtgtttgtttagtccatacagcatttcattaagggttctgaacaagttggttattttaacacttttaacagaaaaactatcactgaaaatgcctttccacataacctgacatgggacactccagtgtgccactgagtctgctgctggccctgcagctcacctgctgccctcactaccactgccccatgctttcctttctttcagggtctactttggagactccttaagctgttgctggtgactggttggtattgaggtacaactatgattttccccatccttctttgttttaaaaaaaaaagtggctttttctgacatttttctttaaacactctgagttgcctttatcattattattgctattattttttgtttttccagatagggtttctctgtgtagccctggttatcctaaaacttgctctgtagaccaggctggcctcaaactcagaaatttgctgcctgcctctgcctcctgactgatggaattaaaggcatgtgccactacttatttttacaaattgccaaacaccaatgagattaggagaagaattttagagcacagaaaggtagtcagttgacatattagcatctttggcaaaataaatgaatgaattagcctgttgcacagtcaaattagttatcagtacagtgatttttttttatcactttggttgtgcctctgctgcacagaatagaaaataaccaccagactgaagatgtggcagccagaatggggaaaatagctttttctagctatacatctgacatctctaatgtgcaaagaaccttaagaattaagcaccaatcaataactgagcaatttaactgaacagacagttctcaagaaaagaaagaaagaaaagaaaagaaacacaaatggcaataaatatttgaagaactgttattagccattgaggaattacagattaaaactgcctagatcttgtgtcaccaaagtcagaatggctatcattaaggaaacagatgacattaagtcttcatgagggtgttggggagataaccctgtacacactgctggtgggaatgtaaactgaggcagctactgtggaaggcagtgtggaagctcctcaaaaaaatgaaagtagaagtacaatatgacccagccattccactcagctatctacctgaagcactaagagagaacactacaaaaatacttgtacaaccatgtttacagttatactattcttaactgcttttaaaaaaaaacaagcatagatgtttatcaacagatgaacaaaaaaattgacacatatacacaatggtaattttgtttagtcataaagggaaataaatcatgacattttcagaaatatgaaggcaactactcagtctgtatgtactggcatgtagatgttttcatgcctgaccatttagtattcagtaaccagttggtgttctcttacctggcaaggaccgactctccagctctcagaattccttagttgcctatagttctttgtgtagggttgaagccttgtgacctttaccccacccacattaacatctctatcaatgtcatcctgttcagctcatgtttaggcagacatgtttatgtatgtgataacaatttatgtaaatgagaccatgaatttgaaaaagaaccaggagggtaaatgcaaaattggggggggggagaggaagtataattgtaatctcaaaaaaataaaaataatttttaaactaacaatagcaaatcctgttgctctaatttaacaaaaagctattctagaatggaaggaaaatgcaattaaaaaaaaaaaaagaaagagaaaaagaagccagtctcagaaaggctgttatgttttccctcatatgtagactccgaatctaactttctgtttgtatgtgtgagagagaaaagctgtgggattagaatggaagctatgaaagagtatgaagaggacttcactaagaggcaaggggggggtgaaatacacgaggcagcagaatgcacactattaagggaattaagggaacaagcaagagggtggcaaatgaggaaggataatggggaccagtgattgtatggtttgggtgagaatagcccctgtaggttcatatgtttaaggtaaaatgatatgtatctatgagaattccatgacagctactactctgtgatctagtaaaaaataaagtaaactgtctgtgcacttgaatacaaatgctgcatacaggtatgaggttttttgaagagcctgaaatccccccatgaacgcagagttaggaacactgtaatacactgtgtcatactatcacaggaatgctgtaaatataccactactgttggaataaaccaagagctcttcaaaagttagttttttacataccattgccatcgcagaactatgatacagcaatcaaaaggtgttaaaagcaaattcagcctttgctggtctttggtagaaccttaaaggacccacagagtcctaacatcagcagagctttcagaatcacataccacctgtcctggctagttttatatcaacttgacacaagctagattctccagagacaacggagcctccattgagaaaatgcctccagaagatcatataggcaagcctctgggacattttcttcattagtggttgatgtacgagggctcagtccattatggatgtactacccttgagcaggtggtcctgggttctgtaagaaatcaagtagagcaagccacggagagaagcctgtaagcagcattactccatgacctctgtatcagctctgactccaagtccctactctgtttgaattccagtactggcttctgtcaaagatggactaagatttaaaaatgtaaaccaaataaaccctttcctccccagcttgctttttggtcgtgatgtaggtggtaagacaccacttgcataagatcctctggatttcctctttgtgcccttcatcttccgtagaaacaagacaacatgtaggctcattttctttcctcttttcctcacccttccattcatattcctacctttgacactgtgcttttgtctattcagacaaggaagtatttgcctatttcaacagaaagtccttgttagaaggcataggagagaaaagaggaactgcgtactaatgcaatgctagaattctccttacagatttgatttggaagggccaaggctgtgtgcacagaattacatttttctcccatggggataatttctggtaggtgattgtgtctgatttcaagactgaactggtaggagtcaatccatgttttctcttctacttcaatatgcattttctattgttaccttcagtaagttgaaaatgcaaggtggtgccatctcttaaggattgcttttccttcagagtagtcagttacgttgacaaaccacacccccttttcaaccaaattgggcctttctcatgtcagctttcctttttataacaaactgttgcacatcatcaacttacaactgttgcacattcctcttacagctctggagagcccagtgcaaggttagttagttttaccgctttgggtccatgatgagtaggccatcacaatgggatcctgtgtcagaacacaaccactcagtccaagagagagcaagggagacaggaggaagtggctgaagacccacaaccctcttcaacaacacatctctggtcacccaaggaccgaccttccttttgccctcacagcttagagctcctgccacttcccatgggaccattttgaggctcagttcttttatacatgaatctttaggggacatttaagatataatctatcacattttgcaagcctatcatctgatgaatcaactctctgaaattagacgttgtggttgatattttagaaacaacaaaagtcatttgatcttcttaatgaaatagattgtcaacttgataattttgttagatttttaagtaaaacctatagctgacctttatccaactgttttaatgtaactcataagctaattttgaaagcaatttaaatttatcacccatgaaagacactatctagtgcagatcacagatttaaatacgtggctttctagcatgagtgctctgaaagataattgtcaattttatttatcaaagaatagtatgtgtttctttccataataaaatcactttctcttaattattctgtcacttgtattgtgacttttctttgacatgagtgctttatgattcctagatttttaatagtatgttgtaattatgatcttgaaactctgaagtcagagtgacttgggttctcacctgggttgtgtgtgtgcctttgagcaaggtgattgcagctctaagcatcaaagtcctcattggtgaaaaacaatggctaaacttactccatgaagttacagttaggtgaagatagagaacaccagaaaacatgcaatgcagacactgcacagagagcgccttcttactactctgactacactagtgagggcaggaagagtggccacgcaggggctgtgaaatgttccccttactacagtttgttgattacctctcatcacaccacacttttcctcttattttctaactctcttctttttgggaatatctctcttctctatttactcatatacgtaaatagttccaaaatgggatgctccagaactgatttgatgccaaaggctttgagatttagccacagcctataaggaactgtgggaccgcatcaaaatagggcaagtgacagtagaagaatgctgtctttatcagtttttcattttttaaacttgaaaatgttcctgctgtttgccattctcctaaactgacttttacattttttggtgtttgataaatttaacacatttgtgtcttgaaccaacatttcctggcatagaattatggccacagagcactcttgtttatataccatatgtccatagacctttggcatattgggagaggtagcccatggtgtgagctaatctagcaacaacaggaagcctggcaactgtcattttaaatgttccattgagtcatctcccacataactggccatttccttcagttccttacgacaacgcatgcaataatatcattcaaaaaatatcatccttgatttaggaatgtacagccacagtttaattgaagtttatactgttaaatatgtcatctttttgcaaaattccataacgtatgaactgttaaatgtttgaacacatgtacatttaatgaagtcatttttttctcaggcactactgggactcaccctgccatttagtcattatcacacttactcaaaatagctaaattattttaaatagcaatacttaataggaaatgttttaaatgtctaatgaaaagaaaatgtcatatattgcatacattcattttcatctgaacccagtattaaaactagatggtggatgctattgcactggtgtggacacactagaagtagctcctgttccagcagtatttattgaaaattaagtctagtttatctatttagagtaaagattagtgttgtgctataaaactaacaagtttagttgataatacctatttatactacattaggaattagtaatatatattcatgttttcatcaatacacatttgttgaactctagctatgcatcagtcattgtactggattcagagccatctctcatccatcaggcagtttccatacagtcaatcagaaagggtgaccactgagcatacagtcaaggtgaagtacagtacaacacgcaaagtgctatttggaagcccagagcagactgggaagaaatcataagaaacagcttctgaaatcattttagctgtgtattccaggattggaaaaggccatgatagcagcagagtgttccaataatacatgaacttttatgagagggagggaagagatagaaatagataggaacatatatatataatttaatatatatatgtctaccccctccaacccccctccattcctttcccccttctcccccttcccttacattcttcctctcctccttccctccccccattcctccctgccctcccccttcctttctcctccctccattctttttccccctcccttcccaacttattagtcccttacctggtgtaagtcacagagatctgtatataactcactcctttacctgctccaagagacttggattcttctctagcacataggtaagtgagttaaggattggagagctccaggaccattacagttctaggatgaaaaaaaaaaaaaactggaaacaaacacagccccatttaaaggctggtccttttctgtgctttttttaactgctggcattttttttagttctagtctttcctctgaagtggcacattgtcatccattcttcctgtcttagaagtaatcatattagcatttatactctgattttagacagtcctcgtctactgttcccatctgatgctcacatcagtcctgagatgaggaagtgagtattatctctgctctacatgagaaaactcaggtttctgatgcatgctgtgcctgtagtgacataactagttagcagtgagacagaaagggaagctcttcactttagcccatgtttcacgtcctcttaaggatgagctgcaaatggaccagggacataaaccttaagctgtaaagtttctaactgaaaacataggaaataatatgtatgacctctggttttgagagaatttttagataggatgggaaaagcacaaactattaaaaaaggaaatgataagttatatctaatgtatattaaaaacaatatccttgaattctccataaggagaatgaagagatggcagaaaaaaggaaaatgttagaaaagctaaaatattagtttcccaaatatatagggaattctcacaaatcagtaattaaaaaaaaacaaaaatgcaaatgattcaattagttaaaagtgggcaaaagacttgaagaatatgacactaaagaagacatttagatttaatcactgggtcatgaaaattttacccaagaattatatacattgttgaaagaaaggaactatgacctaagtgaactgaaacatgccatgaattggaagacaattagacctgtcacaggcactaatacccaaagtgatgctcaagtctactgctctatgtatccagatcatacttgcctgggcagcaataaaacaaccaattcaagaggctagaaaggtggctctgaggtgaagtgtgggtggtgcttttgcagaggaccccaagctggtagctcacagccacctgcagttccaacatcctgggattcaaagcctctggccctcaccagcactgtactacatgtgtgcagccacagacacacacacgcgcctcataaaattaaaaataaaatattctatttagaaaattgattcaagatttttcaaatggaatttcaagggttccctaaatagcctaaaacaatttttttaaaagaaaagctaaattgggagacccacatttttctgtttcaaaactactacaaagctatagtaatcaatttaaagtgggactgacataaggttgggagagattgacaacacaagtgagagccctgaaacaaacccacatgcaatcagctgattcctgacaatgctccaaagtccatcaaatacgagggaaaacagagtctcaccagcagtggcactgaaacaactgtacctccatagacaagaggacaaagctagcctctgctacataaggcatacccaaatctacacaaaataagaaaacaaaagggaccagctagatggtaagagctagcgggtaagagttctggctggccagagcactggatggtctttcagaggacctgggtccaaattcctttcaccctctaggggatctgacaccctgttctggcctccatgtgtagcaggcatttacactattcacaaatgttcctacaggcaaaacacccataatataaaaggaaacaataatatttgtaaaagaaagtcaaaggataaatgaaaaagaattgatgggtcacatgtctgataagaatatccatggagactatatgaagaactcaatcctacaactcaacaggggggaaagcctaacttgaaagtaaataaaggacttgagtggacatgatgtcaaagaaatgcagatgattacatgaaaatttactcaacaccattattcatcagacaagtgcatggcaagaccacagtaagataaaccattagggctataaatttattagcatatgttaattatataaaatagtagttttcactgaggatggttataattttttaaatacaaaccagtgaatatttgtgaggatatggagaagtgaaatgtttgcacttttctgtaaggaatatacagtgattcaactacttaagaaaacagctgggtggttccaagttaaacacagaagtaaattatgatcatgtcattccactcaacggttagttgtaaactcaaaagagtcaacactgtattcagatattcttggcagaagtattcaaaaatacctaaatgtatacacagcccaaatgttcatcagctgatagaatgtggcagatccatacactgaactacaattcagatgtaaaaattgattaaccactgatagatgatagctcatggacaaaccttgaaaacatcatgctaaatggaaaaaagcaatcgcaaagggtcatatctcaaatgattctatttatgtgacatctccagtatgagcagttccagacacaacacttgagtatgttggccactccagggcaggcctcatgttcaggagtagctgaccaacttataatggactgcacagttttttgtgttcttttatttggttacagtttggtagttttttattttgttttgtttcattttgtttttctgtttgggtgttgggtttgggggggatttttgttgttatttgttttggtttttaggtttggaggagtttcgttgttttattgggttcttatttgttttttcagaaagaacttaaagttgggtggggagggaagagaagaggatctgaaaggacttgtggggaagaatataaccaaaatatatttaaatttaaaaattgttttaaataataaaaacataatttataagtcagccatggtggtgcacacctttaatcccaacattcatgacggagaggtaggtggatctctgttatttcaaggctagtcttgtctacagagttccaggacaggacaataaggatatatatatgtatatgtatatgtatatgtatatgtatatgtatatgtatgttaataaaaaagaaaatgcttaaaaaagaagaaggtggcttagtacttgccaatggatgtacctattagtgagttttatgttgtttaccatatacaaagatggatgaatagaaagtaagcacatgcatgtgtgcacttactcacacacacggggtgggggggggatactgaatatcattggctattagggacatacagtttaaaacttcaataagagactactactcatctaaaaaaatggctcacatgaaaaaaatctctgaagctggcaaattccagaacagatgtgaaggaactagatagaactctggcatgtcactgtgaaaaggcaaggtgtcacagcttccctgagaaaccagttgcaccatcctgcaaggttaaatctatgctcatcatgtgagcccatgaacccactcataggaatgaacacattcacacccaaagcaccttccagttagcattccagctttattaataattttcccaaactagaaataagccaagtattcattatctaaaagtaggcaaaaatatttgtttatttgtaaatgaaaaattactcagcaataaaacgggttcagaatgtgagtgaatctcagatgcattaagcggatggatgaagtcagattcaaagtctgcttatatgactttctaggctgtgtttaattttaacttcaattaagctgactttaaaactacctgtgccttttataatccatcgttgtctctcatgagagcacaaaggcaacccttttgtttccgtggtattaaaagtagaaggcaggccatttcaaggacccaaaatccttttccaccttaatcctgcatttcagagaaaaaagctcctaggtcccttcaatgggaaggagaaccagaaaggatggtcaaggaccaggcttcacgctcatcgggaagaatggacagagaacgggagaggggatgcagaagggttgatcaagttaaacatgagaaggagtggtgagcagagaacaaaagtttttcattttatctctggattcaccactggaagcacttttgcctctatgtattctttttcttcatttctttcttttttgttttgttttgttttgttttccgagacaggttttctctgtgtagctttggagcctgtcttagaactcactctgtagaccaggctggcctcgaactcacacagatccacctgcctctgcctcccatgtgctgggattaaaggaaccaccaccacccagcacttctatgcattctacaagctcaagccatcaagttcactagagactgctgcagaatgtttatgctcagatgaaattaaaatctatgtgtcctctcacctttcatggtacccagcagcacctaggaacaaggcaaatatttgaataattaatgagttaatatgctaaaagttgctaaagggcaggacaattttccattaaattaaaaattctaaagggacatgtgttgtgactattgtgttgcctgttctcactgagacggtgctggaggaaaccatagggcgttctttatgggtgcttgttctgaataaagtctatccaaataggctgcttcagtgctttcagaacttgaaaagagacccaatatagacctcagtaatcaaactcaatgtcagcaaagtgtgtcctgtgcagtttgagatcactggagctactctgtggatcatatcattgatttgtggcacgttcatcttgcatctgcccaatggtttattaaaattggatacacaaataccaataaagtgaacagccccattgagagttgaccaaactgcatcattttctcccatgctgaggacatattgtagccagtagtaattttacagcagccttctgtcatactagacatgaggtttgcagccaagcatccataatacagtaagactttccctaaagggcaacaaagaaatgggcttatgaaatcaccgttaaatgtaatagaacattgaagagatgagtagaccaggggaaagatgaagtgacaaacagaatacagacagcccaattaaaatttaccttctccacaggaaggtacccatgtgtcgagaaagctctttatgactattagattctacagcaagagatgagggggcactgggatccttagaagtcaccagtcagatgtggcgaatcattcaaagaaatagatttaaaaatgggccaaaaggtacaataaataccccaatttgtcattattcttccagttctgagtcacttttccataatatcaagtgtgtgattgacagataattttaacactattcttagtgatacagtgataaagacagatataacagagaggtactctgtgtgtactgttcctggtataacacaaaaacataagcatatagagaactaaattttaaagtcatgggtgttgaatgacagtcacccagaaaaaaatggtctctttgctttctgctgcatgtagctttcaaagaagattttgtcatgtgtgtcctctctgaaacactacttaaaattttttacttcactgaagtttagctacaatgtgtcaatagtgtgaactattaggttccccagcttttgaaattaaagtaaatgtttgtatcccaacagacacatacactggagttagctttgtggttctgggaaaatgtagctgtgaaaaaaaataaaaacctttctagggtaatatttatgttatctaatgattgcagaagcctcagtccatagtcacctggacaaggtagttcttggtagtgggaaggccatagaagaagtaaattgtcacttcatgacaactgagaagcacaagaggggtcaaagacccatcttgtaatacggggaacaagcctttaagacatggtccattatggcacacttactctgctattatggcctaggtttacatttacatttcagcatgctagaaagggcagggagcagctgggtgttggtggcacacgtctttaatcccagccctcgggaggcagagacaggcggatctcttgtagaccagcctggtctacaagggctagttccaggacagcctcaaaagccacagagaaaacctgtctcggaaaaaaaaaaaaaaaaaaagaaaagaaaagaaaaaagaaaaggcagagagccgtgaaaatgtgaccatcagttttgtccatcttttccctcatagctctgctttcctgccagtgtagccaataacacacacacacacacacacacacacacacacacacacacacacacacacacacacacgatagaggatattactagttggaatttacctcaggcaagtgaatgtgcaactaggaggcaatacagtttccccgaattcagataaaatttaagagttaccctgaatgtgtctaccagaatgaataaagtttttttttcaagatacaatattaaagtcacaaatgaggacttaaacatctctgctatcaagattcgtacaaactcaggggaattaaagtgactcactggaatgtaatataagaatgtggggccaggcaatggtggcacactcctttaatcccagcacttgggaggcagaggcaggcagatctctgtgagttttgaagccagactggatacaaagttacacagagaaaccctgtctggatagggggagaaagaaaaggaaagaaggaagggatggaggggagggagggagggagggagggagggagggagggagggagggaagaaagaagcaaaaaaagaaacaaagaaagatgtgaagtattgtagggaaaaaactgaaaattctacagaaatgccttcttctgcccaaaccactaatttttttcaatggcctcaagagttgaagggatttccaccataccaggttcttcaacataggtgcaaacacgggtaattaaaccataaagacacttcctctgcaccaaaatggcagattatgaaaaaacctacatcccagatcatattttatttcttaatttatatcaaaatcatctcttttaaaagcaactaccttccagagcctgcatctctaaggagaagcacaaagtacaaggcttggcagcagagaatgaatcatggcagctagatgcagaggctggggagtgcaggtgctgaccactttaccgagatcctcacagtattattagttcctggctctgagctgcataggttaggagtcatcttctccaaccctattttcccacaatttctaatttttgtatatgtggttctgcagaactacacctgcagacaaagctttctttccaaatataattggagcctaggtatgacattctgtggaaaaccaatagtctataggggcgtttacaaagaactgtcattgaacttgtaacatagaggaagtgactctgcaccaatcctttttcttcatattgaaaggtctctagtgtggagaatagtggggcatgaggctatctttccactttagtggaaagaaaaagaaaaacattattcctgtttttttattacatttgttatttagtcttctgattatagttggtgtataggatcttaagcactgccaactcttatcaactggtagtgactacctggagcactgaagcaaaggtattgccgccacttctgggctcagtggaaacaaacaccacaatccattagtgatgtctgtcaggagttccgggacatgtcaccctgatccactgtggcactgttggagaaaccagactaggctctggattcaatagacttacctttgtaaatacagaagtggattctctgattagttattcctatcagttctacgtgatgctgttcacttagatagtagactgagaaaataaagagcttgaaccaatatggctggatgcattaaaatccagacaatgaagcgttgtacattggtcaggtgctgcctcaagagtcctgacacacctttattatctttttactcatgggctttttctacttgttatatatttcgccacatctcctctgttaatctatttaatacttgtcttatttcacccattataagataccaacaaggagccaggagacagtcaagatatggttttcatacatgtgaacttggttattttctcattaaagagggcaagccctgaaccacaaattatttaattgtttaagcagtctggccagtctggaaacttttgttccactgaaaagaaactccagttaaaccctttttctgtaatgtatgatctgaacctgcagaggggaaattggtggctcaaggggagatcccaagagacccaaaggatgcactcataagaaaaccatgtcgtccgtgttctagacagtaccgagagagcatgggtggtatgaggaagagcatggctgtcaggggtcagcagctctgtgttgccaaagaaatgagtctcgggaagacttactcagtatatatcttcagtaactttttatgtttgccaaagatgtattatagttatgattaaaataatgtgtgtgtgcatgtgtgcatgcgtgtgtaactctgggtcttagagtttctatagatgtggtaaaacaccatgattaaaagcaactaggagaggaaaggagttattccatcttactccttcaggtaacagtccatagctgaagggtgttggggcaggagctcaagcagggaaggaactgaagccaaaggcatgaaggatcactgcttcttagcttactcacctgctcccttacatcccaggaccacctgcccagggacggcaccaagcaatgccctgggccctcccgcatccatcacctagtaagaaaatacgccacccacttccctaccagccagtcttatgggaacattttctcaattaagattccttcttcccaggtatgtctaggtttgtgtcaagttgacaaaacccagtatatcatgtttaattttaaaaaccaagcattttaaatagttacttagctctatgtatctaggaaattcacacatgggataacttactggtccacatccacgtagagaatataaaaggaatagacacacccatgaaatccccacttgtggtggtttttagtgccttccagttgccacctccctaatgagcctgagcactcttaaactgacaaataataagcaaaagggagctctggggaaatgttctgctcacttgtgagctggtaattcattggtgccatataatttaatttactcaatagtaaatgccagatgccagatcacatggctgaaaaagtgggccactgattagctagccagcagtttggatgaaatcaatccctttgcattgaaggtggaattacccagtgaggaaaatatgaaagcatggagtgtgttttggcaagtgtcttcagccatgtgaagcagagagtcctgcaagagatgcccctgtcattgtcaaaaccacaatctctcacaataatacagcccttggctatgcttccagccacagccaggaaccacatctcaatagttgtatttaaaggatatgcatgtagggctgaaacagccctgtagaaattcaggtttctctggtttacatgtgtggcatggctgtacagaaagaactcttgcctgccctgggtagctaatgcaatctaataaacttagatgggttagatgtataaattcaaagccaaaaaggcagagttgttttctccaagtggtttaaacccacctgcagaataaaatgaaacctctcaggtctcccccataatggagagccattgtagcagagagcccccttccaggctagtctcaggtcccaccattgttctcattaccatctgtcctgtttccatgctaagatgccctctctttcagactttaaacattttgaaattgagacctttgccacctgaatatctaaggccttagaagttcccttctttacttgatgtttcattgacaaatcaaataatccaacttgttaaaatcctacctaagcagaatagccagatctgtgcttctctgcccctaatatctgctcgtttactacccaaaggtctttatctcaaaggtttcaagattatcatctgtgtgtatagatgtttctatgaagtagcctctagaaaagtgtgaatatgaggctatcagcattgtttttgtggatgaataacccaggaatctcgagatctttatctcttgttaaagtaaaataaaaagggttatgaacagctttcttatttgcctagcatgctgaagcctgtgggctcagtttttcagtacccaggagcaggggagacaaaacatagcatgtaatcaagggcgtctctgcaaagattttctgatttaaaaaaatctggttctcagtctgtgggctgcaacccctttgggggtctagcaatgctttcacaggggtcacatatcagatatcctgcatatcagatatttacattacaatttgtaacagtagcaaaattacagttataaagtagcaacaaagtaattttacggttggaagatcaccacaacatgaggaactgtagtaaggggtttcagcattaggaaagttgagaactgctgttttaaagattctaagggatgactaggggagatggcttagttggtaagcatgtttactgtgcaaatgtgagagcctgaattgacatcgccaacacccacataagaagataggagcagacagtcctataatgcttgggttggatgggtggagaagggatcccagagctcctgggccacacagcctagccaaatttgtgactttaagttcacagactgtctcaaaagataaaagttgagagggaaagaggaagacagcctctgtcaacttctgtcctccacaaccacacaccaaagcgggcatattcatataccacattcacacatagaaacaagcacacatgcaaaataaattctaagcgtatgtgctgcctcactctagaatctaaaatctccacaccatagtcaagatagtgtgttttatgtcttcattctttgcctgatgttagaggaagcaaatcctcttagcccttactccgtacctaccctccatgaagctactggatagagacctaccatgtgatatttagtgtgataaaaccctaccataaaggccggctgggttcccactgtcttaagcttgtctgtgtcggtattctatggagtttgggatgcttcggtagccaaccagctcagtgtccaacataactaaaatttaactcctccttattctcttggctccaggtgcttaatggcatcatccacttgactctatgaatactcttcctggaaataacttctgcctctatcatttcaaagaccttgttataaaaaattagtacattctacatactcagtagctatttttacttattagttattacatctttaatgtttgaaagtctgtatgccttctatctgtcctctcttccatgtcccttcctctgcactaccccctatcccaacattcatgaatgcacaatccagctcgtgcacacacacacacacacacacacacacacacagagagagagagagagagagagagagagagagagagagagtaaccagctcctccatagtttcttaaacacctaggcatttccatactctgcttcttcttctccttggaatgaccttgactgccaagaccatgcttccagcagactcaacacagtttcctacatggatcagtagcacttaatttcttgcatgggtggatatacacatgaaatgcattctacaaaagctgaaacactttccaaacacttaggaggtgctcagtaaatagcagaaggaagtcagtctctggcctaggacagggatgtagtattttaaaactcagctgctccagtgctgagaacagtgatcagaaaacacatgagaaaggaggggcagagaggatagatacctaagactgttcacgctacttaacgagtaccacagactgagtgtggcatatgtgtaaaagaagcatgtttctcacagtccttcctggaagctgggaaggccaaggcccagaaattggcaggttcactgtagactgaggacctgcttcttcatagttggtggattttaactgtgtgcttccatggtagaagctatcaacaactccccctgcgtctttataagggcactaatcttacacagtgtctttcacctcccaatggtcctttctcctaataccatcaccattggggtcaggagctgtcttagttagggttactatcgctgtgatgaaatgccattaccaaaaagcaagttaaggtggcagtatttgatttacacttctggaccaccattcatcatcaaagaaagtcagggcatgaactcaaaaagggcaggaacctggaagcaggagctgacgtagagaccatggagggaggggctgtttactggcttgctcctcaggactttctctgcctgttttcttgtagaacctagcaccaccagcctagggatggcaccacccacagtggaccatcaagaaggtcttcccctaattaagaaaatgccttagaggcttgccttgaggtcccctcctcttggatgaccttagcttagtcaagttaacataaaattatccagcacaggataacaacatgagaatttggagagggcaggtaagcattccaaccatagtatctacaaatctaggaattcaatgcatttccagttatttggtaattgaaattttaaacatttgagaagatgtatacaaatattttggcaagaggtaacctttgagatagtctctcccttcccccccccatgtgtaaaattttaatttctccaagtatcaaaagcttagtgggtattgctgtgacagggcagtggcacactgaatgtcaactccagcctttttttcttcatttttgctattttcaggttataaactcagctgccaactgtcccggccagatgactcttcacctcaacccttccctggtgtgtggcggggatggatttactcactccaacttcgatggctgcgtcgcctcggccctgagtgtcctggaagctttaaagaatcatatttagggtctatgttcttgttttctacattgacttggggattttttttgttttcacagacctctgtaattaattactctgttttccattttgtggagagaaattacttggaaaaatgtctccagttaattgtcatttttcatgtgaaatataaaaacaatgttataattttgatagctaccacccataataaaatgataatttcttagactttgcccctttccctgcttctctgattttccatgaccaaaaatccttcttggagtaaaatggtgcttatgaggaacaaatagcccatccccagaattatactaaatcaaagttcctattcaagggcccagaaatttattagccttttgaaaacttcagttctgaataaagaacaatggttatgaagtctcattttgtaacttcacacatccttgaattgacatttttgcaaataattgaaatgcaagatttctctaagatgtggattaatttttgtttcccatttactttctgagttattaaggctctttgtagtaggtcgcatatgtcaccagactacagcttgaagagaagcttgacccacaaagggttgacagaaagtgacatgaataatcttcatttcccaagttacacaatactttttagtcttaaagcaaattccactctttgtatgtgagataaaagttaagcagaactgagaggaagtttatcagtctttaacactagatcctcatggttggtactgcccattatagcactgggactgtgtcacagctaatgaattttctgttgctcaacaaaatcctaccaaacagaaatagatacatttaaaaagctctcagtattttctaacttagcagtatgacatggcacccatatacttcagtatctggtctcgtgattgctgactggagaaagattgagcctcgggtttccaaacaagctatttgttgtgaatttggaaagcaaatgaatgacagttggtcttaaaaaaaaattgtgggtataaggtttagaatacagttaggagttctgctggtttattaagtagtggtagtaggttctcctccaacatctataaccttatgtgcccggggtagttggctaggtttctaggattaggcatgattttcatcttgttgagaagactttaagtccttttaacagctgctgggtaccaccaaaatatgaatactattgctttaagggtatcttttcatgctgggcattgttgtggtcgtaggtatcacagctggataggactattggttccttccttcccttgtcagtcagcttgcatagcacctctcagtactatgaaaatttgtctcagggaggaggctttcaggtcagatctagccttatcctcctgtggactgtgtccaaagtgtcctcaacaattggatcttacctccacaaagggcaacaaagggcaacagcaacagcatatattgtttggggatatctcttggattctcctggctaacaactgaaaagggggtttcttgtgccttatgatggggtttttgttcatctatggctctggtagtagcattgttagcctaattaacatggcatcatctaaactgtatttaccactcatcaaatgagtctttctttgtggctgatggagagcattacagaaaatcacaactggtcaaaaggcaaagaacaacttatgagatgtctggccccagtgaatagacctacagtacaactaatgcacctaatcctcagagaacattttggaagagggagcaaaaagattgtaagggccagaggaccaggaaatctgctgtgaaattgtgtctcctagaagtgacagggaagctgcactcagcagtgtgactacctgtacaagacttgaataaggacaccactggacaggttagggtgggaaggggaaacctcatggggccccacccctgaacaaagaactacaggtagctaaggaatgctgagagagagaaagttagtctttcccaaggagaagactcctaactagttatccagttccaagtggtcagctctgaaatcacatacataaagcaatactgaatagactcagcatattttatttcaatattcatacatatatgtaacaataataaagaaaaagaggccatgaatttgagagtggggagtagacctgggaggggctgaagggaggaaaggggaaaggggaaatgatgatatatatatatatatatatatatatatatatatatatatatatatatcatatatattgagacagggtttctctgtgtagctttggaggctgtcctggcactcactctgtagaccaggctggtctcgaacagagatgtgcctgcctctgcctcccaagtactaggattaaaggtgtgtactaccactgcttgactttagtttttaaataattgaaaaagaaacaaatttaaagatggccttaaatttatgatctctctgcctcctgaatgttgggatgacaggtgcatactatagttttggttacttttcagttgctgtcatgaaacaccatgaccaacacaacttgaagaaagaggctgttggggcttacagttttagaggatgagtccataaccatcatggtaggaatgctggcagcaggcaggcagacacagcactagcgtagttgctgagacttacatcttgagacacaaccatgaggtagagagagctaactggatatgacatgggcttttgaaatctcaaaacctactcctagtggcacccctcctccaacaaggccacacccactccaagaatgccacacctcctaatctttccaaatagttccatcaactaggaatcaaacacccaaatatatgaacctataggggccattctcattcaaaccaccacagtcccatgccctgttcatgtggtgctgaatacagagcccaaggctttgtatattctacgcaggtactccacccactgagctatatctccagccccctattccgtcattttgaaagcaaagaaataataatttcagactcctaaactaggaaaaatgtatccaaagagtttgtccctgggcagtgtttgatacagtcacctgcttgttcttgcggcatgcacacctacacagacactggcagaattatctggtttgtcgacaaataaggacctgttcttctggcattgaggatagcttgccttttatcaataaatgggcaaaactcaaaaactataaagcctacatgtggcttgtgtcactttgtttgaaagcataggatggaaagataaaatgtagtttctgacataaaataaggaaaagtgatttattccatgacacccatccatgtttgatgaatatttgtttgcctttatttttttttcaagtatctaaaaagtcattcaactgcctttattactttgttttaaacagatgtttgtctgaagccattggacagaaagtgttctgaaaccttaagaacaatggcatacttatgtcctgcaagtgaagaagaacttgtaaggtgggaaatgggttagttacagaatccttcttccaggcccttactaaaacgtttcatagctatttattctaagcatggtagcctgccacttctgcacattttgttagaagttgaccaagtgagcagactccatcccccccaatacctagctcattgtgacttcactgtttccatcattccaaagaccccctaccaccttttcatttccacttgcctcttgccctttagaaaggaactagctaaggaaatccatgtcctggtagctattagaaagatgctataagccgggcagtggtggtgcactcctttaatccgagaactcgggaggcagaggcaggcggatctctgtgagttcgagaccagtctggtctacaagagttagttccaggacagcctccaaagccacagagaaacccttgtctcaaaaatacaaaaaaaaaaaaggatgctataaaagactgtagggcaaggctgtccaccattagcctatgggggtcatcggtgcttcgaacagtgctaggtatatttctacttcacacgaccacacattgccagtgtatttccaagtaaggacttttattagtcaagccagccaaagagagctgctgtgttttgaaaggcacatattcaagtgagaaacgacttgagcggtgggtgatttaatacttgttagctgataaatatagcctttgccgaaataaaactttatgatgcccattgaagagcttaattactgaactgtctctgtgcatcttgctcaggcagccacggtgacagattatagcagtggaacagtgtttgcacctttggcatttctgaaagggaagggtatgactaaaatcaccaggaaagcagtaataatccccgaccagatattacggaggagaaaaaaagactcttctttgagtcaccgagccttctgtacacaatgccatcatacacaccccccacctacccaccactttgttcagggaaaaagaacaaggtcaattttacattctttggcatttcatccttatggaagtatgtgggtatatatctgcccatatttcttatcttctgaaggcctctgtgaaataatcaggacagaaaattcttgtccacatttaacaaataaagaaacaaagagctagagctgggtcaaccaaggtcatataatggcatgccaggacaagaaccagctcttcccatgacccatttctagcactggtaccactcggcttccagatgagcatggtaattagagctggctgaaaccatcattggggtacagtccacaccacgtgatcttcttactgttccttcattttagagagctaacactaatcctggcatgatatgtataggagtttgatgttgaataaaatctccgtaagtacctgctaagtaatttatactcctctcagttctgcttccatcggctggtttatcaccttctggtgaggagggggaacagcgggggcacttgctgtgggaatagctgtatcctaatgacctaatgatactgatggccatccagtggtcctcgtttcacctctaacccatctgtccttctgttcatgtttctctttgtccgtttgccccctgcccccggcttcattctattctcattctattctcttccctttcttccatctcttccagtcattcctcctgctccttcctgataattaatttccatgtgtaaatctgatcccactgtgacccacagtatatgagcttccttgtttctgtatgtcaggattttgtggtgatcgttagtcttgtttgtaattttttaaaaatatttaatgtttattattccacaactctagttctgatttccaaatgcaaaaaaaaaatgatgaacttatgggaacagagagcagaattgtgcctatcaggcttcaatgtgggtcttttaacaatggggaaatgattggtttaaggatataaaactgcagttggacaagaggcatggactctgtgaagtcttgaggtctactgagagcatgataattatggctgataacaatatgctgtattttaaaagttgtgagatagtatactgtaagtgttctcaaaacaaaaatgatgaatataatcatctgactgtagcttcactgatctcagtgctaatgaccatagggaaaaaattgtgtaattttttaccctagtttacttttcctgtcccatatcttcagaagcatagtgccaggtctatcatggatgcttgtgatacaatagtagtcccaccctaagagtcagtctggggaaagcaaaacccagatgcaggattcagagcaaaggcaaaagtgctttccattagtcagttttctggtgctatctgaaatacctgaggctggatgctgtatacagaaaagcaatttcttctgtctttatctatggaagctggttatcaatggcagtgaagcctttggcgtagggaagggcagtaacatgagtaaaagaccacatgatagaaaagaagcagagtgaccaggtttacctcagacccgcacatggatccattcttccttgatcctatgctacacagaaaattctttcagacaagcctataacgcccctggaggaaaatctatgttgtaataattgaaaggattttgttcctcactgtgtgaccttaaggcaattacaaaacctcactacactcatcaatggtgcatacctgatgaaggagaggggcgccaggcaggtcctcaactgtctgaaaggctgcaaaggcctgtttcctcgacatttacctgagatacagaaaagcagatggttaggagctggtacacaaatagcaaatgttttaggaacttttatattgctatgataaaatctgttgatcaactaacagaagagattgtttgtgctaacatttccagagggtcagagcccatgataacagagtggaggcatagtggttgaaaatggaaactgagggcttccatcttgaaccacaagcagagagcagacagagtgaactaggattcgcatgtggcttttggaacctgtggtggtttggatgacatgatcctcttggctcacatatttgaatgtctaattccctgttggactgtctaggaaggattaggaggtgtgttactggggtgggctttaaaatttcaaaagctcacatgtccagttttactctctctgcttccattttgcaggtcaagtgtaagctcttggctatttttccagcactataactcctgcctgccaccatgctccccagcaggatgatcctggactcaccttctgaaactgtaagcaagccccaatcaaatgctttctcatatcagttacccaggtcatggtgtctcttcacagcaactgaacagtaactaggacaaaaacctcatagctgtcccccagtgacaaacttcccccacacctcctcacctgtccaaacagcaccactgagtatcacatattcaaaggcccaagactatgggggaaatctcatacaaaccacctcagcaaaccaaggaggaatttagaaacccaaagctttcagtcaggctgcatcaaaaccttcacaagggctgagagatggctctgtagttaggaacatttactgcccttccacaagacaattctgattctcagcactctgggtgattcacaaccacctgtaaccccagccccaggggatccaacaccatcttgtggcctctgagagcactgcacacacatactcagaaccagacattgatatacagacacaggtaacttttaaataaaaaattaaatttaaaaaaatcatgagacagaatggtagtctacctgagagagctaagacttccttctctttttcttttaggatctgtgagttgacagcccagctgggcaaaacagtgtcaacacagtcctcagaaaggaaccaagaaaggtcaatgagtggggatattagaaaataagagtgctctctgcaacaaatagtcttttttttcttatcaaatgcaaagaactacacacttgcattctgctgaagattgtcgacttaatttagaactgagcctgagtatggagatgcactactctctctagtattcatgtttaaaagcttaattcatggtggcttcatgaatccactacttcctagatgtgtgatcttacactaagtttttatgtcttatcctttcatatgtaaaatgtggatactaactgtactgacttcagggttgtgctggggttatgatatatgctataaagtctctatagagaagaccctcaataagtgtcagttgttattattactactttcattagtggtgacttaggaaaaggatcccctttttgtccattactgtatccacaccttgctaggactcagctaagagccaattgagtatctgtagaacccattggggactgtatttggtagcattgtgaagctagcttctgggtggtttttcataaaaagaaaaaaattggaaaaaaaagagacaggaaggggaaagagtgggagagaagcaaggaagggagagaaaagaaaggaggaagggagggggcaggaagggagggagaaggaaaatgaaagagagagggaagaggagagggagaggaggaagcaagccagcaagttatggtttgttttctgtgctgcttggcaaaccttgcaaggccttgttctctaagctcacctagcctccctactgtaaacagatttttctatgggctaccagctcacaaaaaataacacagagacttcttatcaattatgaaagctcagcctatagcttagacttgtccctctagctcttataacttaaattgacccatttatattaatctgtgttgtgtcccggccttattacctctcttccctctcacacctcctgtttcctctccatgtcccctggcgtctctccccagaagtcccgcccaatctctccctgcctagttaaaggccatttgactctttagtaaaccaatcacagtaacacatcttcacacagcgtaaaggaattttccatagcaccctactgatatgagtcctcacatacacactcatttttctaatattcactgtcaacaaaactgtaagatccaaaaaagcagtgctcagctcacaggtgctcgattaatatctttctatccagcgaatgaatgaattcaactgagagccatttcctcttcgaatgtgtaagggcaccacaaacgctgtggctaaataaaacacaaaacaaaagcatgcctaccatatcctcaataagtgacaacactacaatggctacatgttcctcatcaagtctctgctcaaagacatttggtttccgaaagtccttatgtcgtgtagattcccatcattgggaggggagggaaagcacaaaactgttccacccctgaaaaaaataaatgtatacacttcctaccatcccatgtcactagttcaagttttctgcaaaagaagcaagaaaattgagcagaaaaatgcacctgggtacaaaaacctgctgaacctgctgtacgatctatttgaaaatctggggtcatatatatgatatttatttaaaatacaaaaattgagttacttgaagaaagtgggtagatgaattttaaattgggtgattctgaactagaaattcctatactgtgccacctactacattagtatccttatagaatgagtgcttcggtttttttgtttgtttgtttgtttttctgttttccttttactccttatgcatttagatagcataaataaaattaaatggatttttgcaaatataaggaatcaggacatcattctaatgcagtaagctccatagaaacatatttttgcattttatcttcaccttggaatcgccactgtccagaatagcacgtgacatattaaaggaatacatcgaagacattgagacatcagccattaggaaactacacagtattaagtcattaagggaggcagcaaagatatggaaaactgacatttgaaagatttgacaagagggtctggagagatggctccatcaataaagcacttatcatacaaggacaaggacctaagttcaataccagcacccacatacaaaacaggtacccctaattatttaacaaattccaagcggtcagccctataaacatgcatacacgcaacacttaataggctcagcaagctgtagttatctgtttattcatatgtgtgcatggatacatagagagatggaaaatatataaatctgtgattatataaatttatatgtgaatgaatatttaaatatatacatgtatttattaaatatgtgaatatgtgtggatatgtatatataataggccatgaatgtgatacttgaggggagtgggggatgtgggaggagtcagagggacatgaaggagagggcaagtttgtaaacagcaggacacataaatgaaattttaaaaaataataattcctatggtcctaaccctgaagtggcaaaaacaggaacatccctgggacttgctgctcaatcagtctagacaattggtgagctccaggttctatagaaaataagttaaagtgattgagggagaaactaacattgccttcttttttattttctttttgaaaaaaaattacattttatttggaggaggcaagtgggctctatagcatacaaatgacaggcggaggacaacttctagtagtcagctctctcctatcatttgcgtctagaactctaactcaagtcatcagggtggcagcagtggcctttacctagcaggccatcatatgggccccaaagttaacattctattctcatcatttgataagttttccatatacccccccaaaactacactcttctgaaactcaatggacatatgagtattgacagagcatctcatcgtacatctacagaaaacaacattgccaacatggatgtgtatgcacaactgcacacatatgtcaaacacgaatacacacacaaatgacaaggaacagataagtattttaaaaatgagtcttacttgtaaatatataagctttacaagtcaaatatcatgtccggcttagctgaaatacaacattaaacctagtgtaactgtcacacattagggcgttcagtaaattcacacattagggccttgagtaaacttgtgttgaatgtccaaatgactgaaaatgaacacacttcattcttagaagctgcgcttgccactgactgttacaaactggttttgtctgtatacgcgatatgtgcgccagagtggcaggagggcaggggacgcagattctcttagcagacttgtgtcagcagagctccttggtgatgtatttgctgctgagcttcatctagcagtgggtgatactttatctgtcatcgtctttctcttaaaaagtcattctaaaggtgggaacggttaggcctggatcggaacaattgccaattcagatttgcaccagatattgtaaacactgtagcaagtacacttacttaccacttggacaaataagcaaaccatttcctgcaaactaaatcctgttagaaaatgggaaattagtgaatgggttgcagagggtgatcagttgagacaggtttagccatcctgggtgggcaaattaagtacacagtataggaaagagctaaaagaatcaatattaatggttgaaattattaaggtctatctataattgtttcaataggtcctgagattataaaatttaattacgttacttataaaacatcataaaaattttagaaaagaagaatcaccttagaaagataaaaatgattataaactatagcaaacaaaagcgaatcgggggcataacagaaaatcatggagaagttagagaaccctttatcaaggctctaaacctgcatgcccaaggttgagatgtagaaaatacttaggagggacagatgctagaaagacaaggcaaaatagctattggtgtctatagaattagattgagaaaactcaagaaatttcacttttaaactaatgagaaatgaatagagaaggtgaaatataaatattcaacaatcaatggttggttttctccatgtataataagcaatacaaatgtcttgcaaacatatttatgatttaacatatgatgttaacagaaagcataatatacaaaggaatggacctaggaaagtatatgtggaattcacacaaggacaattgtttagaattttactcaatagtattttgtaagatttaaatgggtggaaatatgacacatccctggagaagaaaagtggcaattagaggcttaaagtatctcctcaataattttaggtgacacacaattacagtgaacttttttttagcccaaaacataattctaaagtcaatctagaatatattaacagattaagacaacaataaggtaataagcatgttgctttggtctatcagaaagacaggctagatacatcaggctacagttggatggaattgacacaaatccacaaaaacgttagctctaatgtagaatttccctgtgataaagggggcagtacaaaaccaatgagaaacaaagaactgtgtaactagttacgtgaaacaaatttgaaaactatttattttttaaaattgtgatttttattctaacaacatattacttgtgctgaaaacggagaaaagtgcattgcaaatcagcaagaataaggctccccttctgcagaaaagatagactcaatctatttcttttcctcttagtatctcatttagctaaaccattgcagtaaacatacagacacacaaatacatagaaacatgttttgtctcatgagtaatgacattgtatacatatgtgtgtatgtctctctgtgtgtttaaaatcctggtctacatcatgagtaaaccaaaacatacaagaaaccacaatgttaggcaagttttagcatatcaatttgataacttttttttaaaaaaagacgaaatgctaaaaagaattgaagaaaatactagtagaggtggaagcattagcaacagtgattctcaacctctgggttgtggcccctttgagggtcaaatgacgctttcacaggggccacccaagaccatttacattgtggttcacaacagtagaaaaattatagttatgaagtagcaacaaaaataattttatggtgggggatcaccacagcatgaggaaccgtattaaagggtcacagtattaggaagttttcaaatcactggtttaccacgtttctgtcttgagttgacaatgtctgctttaaaagaatgtcttttaattcaaaactgttgtactttgagaaatcttttgaaaataaggatagctgtttggaggtggcagacgcctttaatcccagcactagggaggcagaggcaggcagatctctgagttcaaggccagcctgttctatagacagaattccaagacagttggactgtacaaagaaacctgtctcaaaaaaaaaggaaggaaggatagaggcaagcatttatctgcaatataattaagaactgatcgtgacaggttaattgagaaaaaaaagaactgatcataataaagaaaaaccgtaaatgacctaaacaacaccaataataagaaatagctgaatatatctgggtagatcaaaatgacaaaatttaatgcagccattttaaaatgcactttcaaaacatgtttatttcttatagtattaagagaaactcataatcgactaatttatgatcttctctctaaaaacacaagggagtaggagctcatccgaaagtttggaggaagaaagaggggaggtgatgtaattctatttcaatggaaatgtattttaaaaactataacgtgcttgtcatatatggttccaatgctctggaagacaggataaagactggaatcagcagaaacggttttttaggcagctactggttttggtgagatccagagcattcgggaggccatagacaagaaagaaatttcaggcaaagctttccaatgtgagtgtcaggtcagcagccagtgaggaaagtccactccagctgtgcttctatccctggctgggccatggcatttagagagcccagaggagaggttgctgggttatgaaatccagctgcctgtgcagaagcttcgagaccaaagctctcaagtccctccatggcattcagaagcctgaggcaaagtttctgcaggtgagaatcccttggtcagacttttaaagatagtgggaagtctccatgtgatcatgatattcaaatgtctggagataatcgggccagtgttatagtgccaaggtcagtgatatggatgccaagggagattggctaaaggaggaagacaagctccctggagaattagtctacccaccatttactaactcaggcttttagagctggtctgggggcttcacactgtagcctgagtgaaaaagtacacttttctttaaaaaaaaaaaaaaacacagaaatgaatgagaatgttaaattttatccagaggtaactctctgatggttcagaagtcaaacaattaggtgtacagaaagacaggtaaataaatggatagatttagagagacagaagacataaaagtaactaaactagaaatttagtttaaaaataaacaagaatatctgtgttaagggagccttaaaagccactgaggatggaagtctcactaatgaaatccacctctggccctgggtagaaacatggcgttctgatctctccaaggattagaacattgcacgctactgtctcgtctcttaagaggtcattcaaataggcctgtcaatcacctagccaaaagactacccctgaggaaggctgactcacctaaagtcatgcggaaggtaggagagcaatgattatccccttgactcgaaaatgtacttatacctctcccagaaaccccaccctctgcacggtcgcttaaggagctgccgtcgcatggctttgttaggcatggtcatttttcagccccagctcagaagaacctgtcctctccttttctatcttttggttgcaaacctgggctggttttctcttgcaccgtgggcttttctcactttgtctgatgctagcgctgttggcttccgtgtagtagctggctgacctacactgttgaatgtgctagccctaagtcaaaagccatggcttcccctctcctcttccccacatccctcctcctagctactgccaagatttacaaaccacctcttccgtagctttctctccaactctacgaaacctgctcctgaaccttcttctgaacctgattttaaaacttttatcaacaaaacaaactatccagaaagggaccctggtttccctggcaacatatggcattaaaagtggggctcactataacttctggaaacatttgtccttttttaaaatctctacaagtttaaaattataacccccccaaaaaatgtatttaaaagatgtaccaaaagcaactagaatttgcaggctactcaaaatcactttttcgtgggatcctattcaactagcagataatgaaaatggtcatagttccttcctagcttattgtagaataatctttttgtgcactgtgaatgtgaagatgtattgttagtattcaggcatctgtactggcctgcctgtggggtcttgacaagatacgccctcagctgcagccactaagagtaccacctgtgcacattcactaggttatctttttagaaaggccctgtcgaccttccatcctctttctctccctctctctgtctgtcccccctctccccctctttcctctctcctctctcccactgctcctgtctctggaggctggtatctctccttctccttcccccttttcatgatcccttctcctcccccccaaaaaataaaccctctgtttgaaccctgttgtatggcatctttctctggtgtgctgcttttctgaaatcacaacatgtgtcgctctggttgaatgaaaaacttaatgtccaatagcttgacaggatttctaggcacagagggacagaggaagactcgaagcaggagctagactcccttttctaagcactagtgatttattaagggtttctaccttcaatgtggttacattccaattaattaacataaaattcaaattattggagcccacagaaagttcatgaaaaccacattttagtaaatgcccctaaggaatagcttatacacatcaatgcactgtttttcaaatatgggctttcacctgtacgtgctttgttataactgtttagtgagacaaactgcttcttcatttttaattaaaacagtgaagaaaagcaagtgaagatatagaatcatgacacaggaaagaaatgaccatcatttcacaaagtttgttccacgccctgtatcccaaatgaacactaaggttcatttggaaaggggttgcttgggctggagagatggctcagccattaaaggctaggctcacaacatagcctagaaagtatgtgttccaagaaagtaggtacataaaatgcatcatgaatcctgttcttcttcgacctcatatacaacagttttcccttagcccaaacagtaaaatatgaaatactgggacagagcctccttaggagggacaggccttttgaaacatgactcaatgaatacccttgatgtaattcttcctctttttcctcctggcctaagctgggaagagcagtctccacagatggcccatgtctccagcaatgctgcatcactttgtttgcaaggcattgtagaactcagtgcactctgttctagtaccgcacagcagaggaagggtagttaggactgttagaatgtaattggcccccataatcccaaagggagtggcactattaggaggtgtggccttattgaagtaggtatagcctatttggaggaagtgtggatatgagttcccttttgttcaagcttccttccctgggtgtgacagtcagtccacttcctgttgcctcctgatcaagatgcctccagcaccatgtctgcctgcatgctgccgtactccccatcatgaagataatgaactgaacctctgaactgttagcctccacctcgacaaaatgtttccctttataagagtttccaagatcatcacatctttgcacagtgagagaaaccctagctaagacagtagcacacaggaactcctgagaccaaatagctccatttgctaagaaaaaaatttttttgcttattttggtttgtgggatactttgttttgggttctggttttcctgtagcccaggctagtgtggaaccagccaactcagaccttgaactcctggtccagcctcagctttcagagtattgggattacaattacaggcatatgcctttgtgtccatctcctgagatgcagaaacaggtacttagggcataagacagcgttcttttcaggtcaaaatgctggctgtgtgattcgggcttctcgtgcccaatcaaaaccacatgtaactcatgtgtgactcagatgagagattccagttgtcataaatcaaaatgaaacaggatagggtgaataaacccacatgagacaaactgaatcctcctgggcacttggggaacctaagagcctgctgagctgaacagtgcagacatgttcctgtggttaacttgcatgctagcacagaagttctctgtcactgagaagagaaatccaaaggctgcttcagcatcaatgatcccctgggtctttgaggacagttgcaggtgagtcataactggatacatagagaggtactcttcaggcaaaagatgctcagcatctatctgattcacagcaaaaaagagtggctcttggagaactaaaactgggaatactcacactaaaaaccatccttactaaagcgattccatccctgactcaagtctcagacgtaccacctgtgagccccacacaggaatctgctcactagagaacagagctagatattccagctgaacccagatgcttccacagcattggaagccaagcctattccatttcaggatgaaccactcaaaggcttaattttgagcagttgtactgaagatgccctctgtccaggacaggctgctacaccacatgccaaagataaataagagagggaatgattttttccacggcctcgtggtgacccccacaacctcatagagacccacactatctcatagtgactccacatgacctcatagtgacttcctccaggtcaatcttgctagatctcagcatatcacacagcccacaagcacccaagagcaccttatgcatcaacagcacagaagccacctcaagcacagagactggctctgcaagggacagagggaagaactccccaagaaatgtcttgttcagtcctccaaatcggggacttgtgcattgtgtttttaaataagaaaactccttcccaataaaatcatccagaaaggtactccccattcacttggtagttgggattgtatatttcctgtgcactgttgagatattagcatttggaaaatgtggtttccctccaacaaggaatgaatgaactagaagcgcacaggcttccccctccattaaattccagttatgggctcaacttagcaaacactgcagcaggcctgagctgagtttcctgagaatgctgaggagagacagtttacactgctctcagggggtgccagcgtgagtttctttcacagcagtcagaagccaggcctgaaggttagctcagaggtaaggacagttacccggtaacctgagttctatcccagggacccacatggtaaaagaagaggctaattcccacagattgttgtttgacctacacacacacacacacacacacacacacacacacacacacaccactacttatccaagaaagaggacttaaaacagaccaaactaacaattgcaccaaagtccaccttggtgaaccacaaagatttcattggcattgctaacaagagtataggtgaggggttccttacagaggcagggataatgcagaaacagctgcctcactgaagggcccacgccaccacccatgatgactcatggaaactgcaaccctggaggtctctgcagggcttgcagacagcttgacagctctgagaacttattgtgcagctgggatggtttcagtctccttccccgtccattgcttctatgaagctggggaggggtcgtcaagcattgttcatctttcgctttctcagccatgtgatacttagatacttatttatttcctaagtgccatcaggcacccccacctcctcctgctggacagaaaacttcaaattggatgaaacttcaacacaagtagcatctttggtcttttcccctttcaaacaggtactatctctccttcaaagcaaaatgacctacaaaatttgatgatatatgtgtttacaaatgatttttaaaatatctccacttcttagggctttgagtgaggtgagaagacattaaactttgctatagacaaaaatatcattatttaagtaagtctttttaatcataaatttatcacacgtaggagcaggtcttcagattgaagtaacactccaccttcaatttgagggccctttaagccatgaataaaggaacttcccaggtcctgcttcccaactccatgaccctggtacagatggccctcagacattcatggcttctgtccttggcccattgggcagcaatccaaatggtgtgtcacaatctcttatgagtccaaaggcccctgtggtagttatgtattccctctaggtgtgaagcaggccaagccccagcttgacagtgggtgtgcaagatcacctagatctaaatgatgtcgctgtcaccttgtgcttctgccaatgcatcaactaaacagtgaaaaaatatgagattagggaggaggaactaataaaataaacttcatatacaatgcccaatttacatatatgcaacctgtccttagaaatcccactgtaagtagccttgactttgaaatgtcagttcctatggactctgtgaatcccaaactagggtcttgcacatgaggacattctattcagcctcctggttatcaaacactttttcaagtgactaaatgagtcagaaatattttagcccaaaatggctacaacttcctaattttcaatgatcttttattatgaactccaatacaggattgagtgtggcaaatgcttgctcactgttttaatcctaactgcctttctctccggagatctcgcttgagtccccttcctcttgttacactcagttcctgtggttaagggtgggatggggcataagctctagactaaagttaatcagtgcttccaaaattgttggccatgacaacaaattcaccaataaaatactcatgaaagaaacttgtcctgtcagatacagagttcaagactttgtgagaccttcccactgcacttgaacaaaggacctgagggtaagatttgcaggagcttggccatcatatggagcaagtctaaagttgcttgagagcccactgaaaggttctaaataaagtcaacacagtgaaaagtaaggacaagacgtggaggctcactgagatctgatcacgtgagctctgagtcctgaccagacagttttagctgaatggatcaataaattgttatttgtattaaatgagcctaatctagtttataactctcattctagtgagaaagatacataattgatatgagctacgtggtcaactcctatgctctccaattcttccccttgtataatatggctatgtctagtcagtttcaattccctttttaactcagtcaggatactacatctatgacagtgggagaggggcatgtggaaacgtgggagctttcttatcacaatggctagaaggagtgcccacccatgacattgaatggacacaggcaaaaatgctaggcagtctgactattccggacaataaagaacagtcccacccacaatgccagtagtggcacccttaagaaaccatcagattgtgatgaatgataccaaagtcctgcccagaactggtggcaggtggcagttagtgtcttcttgctaggaggatgaaaaggaagttcagaagtctagggaaagtatatataacagaagacaggtgactcctcatgcacttctgaccaccattaaccattcacagaacatttctgcttcttagcaactctaacgccaccgttctcctctaagaccacaattgtgcggattggtttctttcatgacacttgtcatcagaacttctctaagagcagtccaatattgtcaggcttctgttccttataactatggctccttaagaagagcctggagcacattccctggcaacccctctcccggagagtccctcttctgcctctcctctcaagctcctttctgagaatgtctaccattaaccattttttaatccaaactcaaaataggaaagtttgacttccttgttaacttttctacaaattgcaggctttgtacgctccctaggtaagtttaaagtatgttttggcagaattttcttgatgcggtctatctactctttgtagttgcttggatatactgtttattgagtctttagcaactgtcttcaaacatctgccaagcttcagtgccctgacctgaaagatttgtgagtcattagacacagaatgtctggtatatcaattcaggtcttctgaaaagcacaaactaagacaaatcagatgtagaagagaaagcatccatgaacgggtaaggatacagggagtaggagttgtcagaggacacttcagacaatgaagtggagctgaccctacatcaagggaggaagaaggaaggaggaagagccaatatagaaccaacaggaaatggcctcagcttggtcccatagcaaatatcgccccctaggggaaggaagtggctcatgtactgctgaccctgggtctgcttaatgcagcagctttctacccacaaaccatcttcctcaagctgcatcctgttgcttcttgagatgcaaaggaagagcatccttgctctagggggaggattaactaattcctttgcttgaccacttacaacaaactcagaccctccctttactaaaaatgaaaaggtagcagttacaataaccaggataaaaagtctttctgtgtgatctgattttatttttaggacaaccctgttgagaaggtctttttaggctgggatgtggcttagtagtctgcacttagacggtatgtgtgaacacctgggtccaatccctgactttgagggtgaaaagggttttctagcattcatcttcttggatgaatgagggcactaaggcaaagaaaacatatataatttgcttaaattgatcaagttattaaataactaagctgagacttagctcaaatcattctgactccaaagtctatagtcttaaacatattcccataattctctgtttcccaattggtgtattcaaggcaggcccagattttgtggggcctaaagtccctagagtcagaagtgtgaggcaaaaatagatcatgaggtgcattcagtaagaaaatagaaaattatgagaacaaaattcaatacaaggcctcaatgatatacatgtaagtggggggggggctggggctcacattcattagccttggtgtgttcacttttgattgtggtgattactgccaatgctgttgctaaggataagtatctctatcaaaattccaatacaattcttcatagaaattgaaaaaaatttaaacttcatatggaaacacacacacacacacacagagagagagagagagagagagagagagagagagagagagagagagaatgaaatattaaaataagtgctggaagttatcacctttcctaaactgtactatagagctatagtaataaaaatggtatggtattgtcataaaaaacatatatttttcaatgaaatagaattttgaagatcctggaataaatccatacaccattggacacctgatttttgtcaatgaagtaaaaaacgatatgctggagaaaagacagcatcttcaacaaataattctggtttaacaggatagctgcatgtagaatacaactcagctccaggtgtctagacctggatagaagaggaaatagagactatgcttgatcttgtaatatcatttattcctttgtgttgagccacattcatagctgtgctgaggtatatcagcccatgagtcacatgccaaacatgcctgtgggaaacagggtggtaacatttgctacacatagtatttagaaataaaaaatgactagagtcttcaggacaaacagtcaaggaattctggggtaatcccagtgctcttctgggatgtggggtgttgaaagatgccctgatgtgtgggtctgaagataaaaacttaggaggcagcttatcactatgtccatttaaaaaataatagatgagctttaaaaagttatctcatggtgaaacccacagaaacagctgacctgaacaagggtgagctcttgatccccagattgatagctgggaaaccagcatggaactgatccagagcccctgaatgtgggtgtcagtgaggagacctggaaaatctatggggccccttgtagtggatcagtacttatccctagcataggtatggactttgggatatatctacatgcagcatcccatgtgggatggagggatactccctgaacctagacacaagggggttggcctacgccctatcccaaaggatatgacagactttgaagaccccctacagaaggcctcaccctccctggggagcagaaagggtatgggataggtagggtgttagctgggggggggaggcaggggaggaggggagggagagggacctgggattgacatgtaaaataaatttctttctaattaaaatttaaaataaaataaaaagttagctcactgggcagtggtggtacatgcctttaatcccagtactaaggaggcaaaggcaggcagatctctgtgtattggagtccagcctggtctatggagcaatctccaggacagctgggactacacagagaaaccctgtctcaacccctaacacacacaccaaaaaaaaaaaaaaaaaaaaaaaaaaaaaaaaaaaaaggttaggctcactaggagcaaagaagaatcccaatatcaaccttgggcctacacacacacacacacacacacagagagagagagagagagagagagagagagagagagagagagagagagagagagagagagagagagagagagagattatacactcagaaatacacaaaaaaaatagaaaataaaacctctgacttctctgtcctcctcactttagcatagctcctaggttctgggaaacgatgagcctgtctttcctatttaatatctgggcatctgaaaagagcgtataaccctagatcagaatacctctacctagaatgatcagacaggccccattgtggccacctagccagcttagaggactggcatttttgccaataaccccttccctcacctggcaactatggggactcacttttcatcatgcctcaggttgttcatgagtaaaaggtaagaatgaacaattgtgatcattgagtcatggttgaatttcatacgggaatcaccccagtaatggtcatagccactattaaaatgctacctagggtgtgtgtgtgtgtgtgtgtgtgttgatttgggttatttttccagagagggtttctttgtagctttggagtctgtccaggaactctctctgtagaccaggctggtcttgaactcacagagatttgactgcttctgcctcccgagtgttaggtgtgcgccatcactgccctgcttaggctgtgtgttttatatgtaccatctcatgtacttcccacgatggtaccaaagaaagtgacactatacgttctccatacagccatggaaactgaggctcagaaaactcaagtaactggaccaaagataccagagcaagggagcaatggagtcaggattaaatctaactatagatgttgctctttcaattagttgaattatatttcacttaatggagccagagttcataatcctgtacatatatctttactgtacaaagtcctctgaaaattcataaatgactctctggcaggaaataccatggattacagtgacttagctgccctaataaactataataaataactaataaatagactataataataaactactgcttctggcctgtcaagaaaaatgacattttgcattttaaaccttccctcatcttctcaaaatattattgatatctgttgctgtactttattctcatagaaaaatactttattagacagggaactctgtacgctagaggtcaaaggtcttctccaatgactcataagttccactgactccttagcccacagaattatttttgtgattatcatatgtacttcaattactttacttgattttttcaggtgaaaaatatgtatttgttgtgataaatcaaacaatgcagctgtacagtagattttaattgtctttctccttcttcttcccttcagactctagtggaaccacagatcagtgtataactttctgctacagactgtagagatcgtggtttgaaagataatgtcggagacagaatcgcagagtaaaaggcacttgtttcagtaagtcaagaagtgtgacatttatgccgggcattggtggcacacacatttaatcccagcactcgggaggcagaagcaggcagatctctgtgagttcaaggccagcctggtctccagagcgagtgccaggataggctccaaaactacacagagaaactctgtctcaaaaaaccaaaagagagatagagaggtatggcatttatgatttaagacacaaaaaagctatgtgagcttccctcagtagtatctggttctttccctgcttacttcacatttgtccccagggcctagcattccctgcacggccttcagggattcattgacattgggtgaattggcttatctcctcagcttttcatccatttgacatcagatgtgctcatcctaatgaagaaaaggtgtgagtcatacccaccctgccaccctcaccagctgcccaccaacttcctctgagggtgttctgtagcctctgagggtgatgttattagatatttgtattctgcgtaacgtcttggtgggcacagtgttacccggatgtaaatgcaacacagttctcccaagagtcttactgttcccctaacaatgacagtgtctcttgggcttctgtcttaaaattgtttgaccattgtcagattcgtgccatgtcaatcataacatcataatgtgagtggtgttcatctgaggcttgacactgggatgagctctgttgagtaattaaagaatttattttggatgtgggggatgctggagcatggaaaaaaaaatcacagaaaaaaaaagccagcaacaatacaagctcagtagggaaattttagacatcaaacatttttttttatacaaaataccaaaggtcactagtctcccacatcaaatacacagacatttttttaaacaaatccatttcagtctgagtctcaacacaggcctaaaatatgtgtttttgaaaaaaaaaagattctaggataattttaattttgttgttttccaaaaatgaaggaggagaaactgtttgagatttagttgtggggaattgtgaacagtatttcaaccttgcccaagaggttgacagttagatactgatgctgaagtctaaattttcagaattatattcatttttgatcataccatgttactagaggggcaaggcaggctccaaggtgtggcttcctgcctgtttttcaaggaacctgcagcccccttgtacacacataaggctgcagcccccttgtacacacataaggcattctacactttgcccaatatacaacctccacattcatcctggcattgactcaacaggaggctggggtttgatgaactcagcatagaaatgatccttcacccatattaccccatcgaagaaggctgatagaaacgaaggctttcaggctgttcccaaagcccgtaacttgttctctttcacatctgcagccgtgtcctcctcagggagttgtccaattcaatgtgattttaaacatctgtcagctaaatcagagctccaaatttagcactcgggaacattatgcggatgtgcgatgctcgctggagaacactgcatccacaaactcagctcacaggagacagccgggtggtactcccattggtaattttatctacgagacgtttaatttggctgtgcatttatgacaattatgtaaaagggaagttgtgaccgtttcctcacaaagggttttctgctgagaactctgcatttctctctgatcctttgcctgtgtggttttgtttgtttttaatccccagaggccagtttgatctgagtttcctgaaattctgttctccatcctgagacatctttcgggtctggcaaaaaaaaaatgtaactctgctgtatccatcctaaagaagcatggttctcactggccacctttgatgggcactgtagcatagctcccttctctccactggagggatgcccctgaagagctgcactgcagttcaagaagaagacaaccccatgcctttgcagaggcaaatgactgctcatttgggagtgtgtaactaattctatcaatttctgaaatcatggcatctgtaaagggagacacagggagaaagagccttgtaaaatagtatggccatcgataagtgtctgatcacaatagacgaacatgtatttgttgcacttagattcacacaaaatctcccagcttccaagatccagtgctccactaagtcctcagacctagttaccacatgctttcagctgtggaagcaacgctgtgagtctctgctctgatttaatgtgtgatgctattaggaagaatcttgtaatgctactgggtctcggaagcagcaactgtggtgtttgattggtcctgtgtaaccaggattaggctaggcccagaacaagggtctaatgagactgtagggacagtaaatcagtgcatgagtggcaggcagacaggcatgaatttgaactgtctcaaggcaggggaaggtgacgctgctgctgttggccagaggagatgccttacaaaatcatcctggcaaaactacacatgcactactcacacatggacttgaacaagactcagtacagggtttccttgcttttagagaaaaggtgagcctctcagaggagttataaccaattaagagctgggacacagggaaggtggctgcagagcactgagctgacaaacttagtctcaaaacattttctttctgacagtcttggtgtttaacacatactctaggggagcctgatggctcttccttctcctcacgccacttctatggcaacacacttaccttgggaggatacattagggaatagttaaaaccagagactgtagcatcagacagatcaaaattcaagccccagaccactgaggcaaattatcctgggaaaattagcaaacatctgagctagctcattgcatataagggatgcaactcaagtagaaataaagtacctgacacatagcaaatgttcagtgtgaccaaaattgtcatcgttactgtaattaatttgggtttgaattttgcaagtgataaaaatgaaacagtgctggcttaagcaaaatagtaacaacatcaatacaagtgtgacttacagaaatcacaagtagaaatgtgcacgggcctcagggacatccagtcaccattgtcttccattgctcatctgctgtacaagtctccctgaactgcatatttgcctcatccccctcggggttgagaaaaagccatctcccacctcctaacctgccatcctgcagcttcaactttcccaaaagagaccagccagaacctttttcctgttcttgatgtcatagactccaatgcattcacctggcatggctagaggcaggggtcaagtgacacttgtggtccccaggaagtagcagatgtggagagtcgctggatttctgggagagaaattatggccagatgttacaaaagtactttcaaactagtataatggtggaagtgcgatattttttaaagtgagaaggtgtgaaaatgtccttagtgaacaaaatttcatatatatcgtggtcatgagctacactcatttataaaggtagagatttatagggaacacagagaagttggtttatgctgtggtggtgattttttaatgttctctgatttaataacaaaactttgttgaatgcggaaagctcttacaaggattaataacccttgagcttttgccacctaacaccttagcgaggattagttgtcaactggctgagagccaagcctctaggggtacagtctcaggccagaaggaggagggaggaggcaggaaaatgccaaaagtcctgaaggccaagctcctcgttctctaccatgtgcaggcactgaggccctctcttcatagaaagtcagaaacctggctcagaatcctaaagccttcatcgtattttcacaggacagtctgtaaactccagccagagacaggacagctactagaaaactccctgggtagtttaaaaaaaaaaaaagccatcagaaacactgtgaaaagccaccttgtgttttttagaacaagacgggagccagcttccaaaagccctacaaacatcctatagacacgtttccatagaaacagatgatcccacgcccactctagtagcctctgagcccatttggcattctgtcctcagttccacccctgggtgcagtgaggataacccaggaaaagtctttccatttagtctttggcaccctgcttctaatagcctgaatgtccatgtgctgcttcttttaatgttcccctcgagggttgggtaggacagatggtcactgtcatgttaaagccaaagacttatgaagcaactttgtgagcagagtgagtacttaactcctgccccagagacagacccctgggactcttgcctgaatggggatgggattctgcttcattgtaacacagtgggtaatcgcattcactgccccatcttcaggggagtggttttgaaattgctcaagctggctgccctgagatattgcccaaatgttcccttaggactgcttttatcttcagcaaagctacatatggccaaagctccagaaaaattcactgaaacctaaggactttgcgtgttcaagacccagacatcaaaagagtgggagttctgttgccgggtccattccttctgctcccataactgtcaccttagctgaaatcaccaacttacacaatttggcagagttcatctataacctggccctctatgtcctatagacactagacatacatgtaatctgtataacacatgtacaaaatacattcattaagcggttgattaaaacttgttatctaaaattaatggctttaaacacatttttttttattatcttacagtcctaggatacagatcttgttggcctagcatcaaggtgttagtaaggctatgcactttccgagactacacgtaagaatcaagtacctcccttttccaattgccacaggctgcctgcattccttgtctgtggccccttctatctgcaaagccagcagttgcaggtggagtcactgtcttggtttcttttcctgatcctgcaataaaatattctgataaaaggagcttaaagaaggaagggcttatttagctcacaattccaggtcacatcccatcattgcgggaaagacacagtagcaggagcttggagcaactggtcacagaggagggcaatgagtgctcctatgctggtgctcagctagctatctctgtactgcgacagtattccctagtccagagaagggtccctgttgtggaatatcagtttaactatgtaaagacatgtgacatttgtttatgcttgggaaatgacttttgtgtataggtgtgttacatttgttcaacggtgtaaagatgcgttacatttgtttgtgctgcatttgtttagttatgtaaagatgtgttgtatttgttttaccttacctgcctaaggcacgtgattgatctaataaaaaaagctgaatggccaatagctaggcaagagaaggataggtggggctggtgggcagagggaataagtagggggagaaatctaggctcaagagagaagaaggaatcaagaaaatgagggaggaaataagagacatacctgggccagaagccaggtagccactagtcagtcatggagatgacaggagagtaagacagacagacagacagacaggaaggaaggaaggaaggaaggaaggaaggaaggaaggaaggaaggaaggaagactttaaaagccctgaggcaaaacttagattaagagaaacaggataatttaaattataagagctagcaagaaataagagctaagatgaggccaagcattcataactcataagaagtctccacatcatgatttgggagctggttggtggcctaaaaaaaaaaaaaaaaaaaaaaaaaaaaaaaaaaaaaaaaaaaaaagcctgctacaggtcccactcacagtgaggaggtcttttcaaatcctaacttaagacaattcctcaggtgattctaggctgtgtcattctgattgctaatgctatcacaactccatcccttgtcaacttaatgcccaaaacttcacctctaagccacaatctttcaccctttgtctcaaatgattcatacttgtctcaaaacgaaaatacaacccagtttttaaagtcctcatagtctttaacaattgcaacactttagaagtcctaaatctctaaactgttatgtacttccagaatataatgggtcagagttaacaatctttttccaaaatggaagacttgggatgaaataatcacaccaaaacaaaaccaaaatccagaagggaaaacaccaaatgttggatctggggcttataatgaaatcaactagtttccaaaggtcttgcatagccctatcccttcagctcacagaggctgtcttctgtgacagcaccagtccacattacaactctttggcactatcctacagtcctggtatctccaaaactctagggtctccactgcaacagaggcttcatcttaactttacatagtagcttcttagggccactctgtaggcacgctcacattgacacacatcacctggtctcagctgctgtccacaaatctctcaatgttgcactgcccatgccttcaaaataaagaggacattgaatggacattgattctaagttcttcctccagctcaaggtgtcccttgtccccttgggaccactctcccagtcacttccttttcaggagcagggaatccattcagactttctccttttaaatgaacttggatcttcacaagatggaacctctggggtgtgttgtttttccctccggacaccttccctgttgtcctggtgcaggaggcttgacctcggtggtgctgatctctttagtaatcaccactgctttctccgcaccctcctgaatgttctcctgccttgagcttcttctctgacaaacaaattagtccattacctctcaatccagtgccactctggtttgaaggacatgttcagatgaccatcatattcttggccaacatagcacctgaatggccccaccacaattcctgatagagtatttattcacatctggaaacttaaaaactgtttctcttagcatccccatcttccaaggtgtcacaggagtggcctgttctgatctaattccagctttcaagggttgtcctaacccaaaataccaaactctttcacattccagccacaaagtatttccaaaggccgtagaaccaaccctagagtcaggtttatctcagcaacagctccatctcacctctcagtaccaatttctacatggatggcatttcctgtttgttgtgatacaaatgctgtgacattaagggagaagaagttgatttgtttcacagttccatgttaccgtccagcatggcagggaaatcacagtggtcagaatgtgtgcattcatcacactgtccattgtggctgggaatgcatggccagcagcctcgagcttctgtcaccttaaccttcccatgatgcattgtatcccagaaccctgaactagaacaaacttcccccctcctttatttgcctttgtcagagttaccacagcaacaaaaagaaattaatacaataaaaaagaaactcaatgggagagaaaataatacaatctccaattgaatcactccagcactgactctggcagctccctcttcaatgtcaaaaggattcttgtgatgctcttaggcctttccttgcctccttgcaagtagtatgatattttctcatactggaggcttggttgtagatatttgggaggagagccgtattctacccaccacagacacttacttgacaactttcttattgcaactctatcattgttcccattttagagactaggagactgcaactcagagaggttagtagaccacacagaaaattgcaaaccatggcctcagtatcagacccaaggaacctctgacatcacagatgaggccaggcatctctccactacatggatataactgtgtttggccgtttgtgtagttttgtctttgctcagaacaaaacaccctctccttgccaaattcctgcatgacccagtctctgccttctctaactccattccctctgcttccataccccgaggaacttgaactcactaagtcctctcctgcctcaaaagttgtacaccaatctccaacatggcttcccctgattagccccacacttcaggtcccaagttttatgtcactcaaaagtaacacaggcctagcataaccccttctagtataccatatagttccctaatagtgcttatcatgacatcctggttgaatacttatgtactcaatagcatctctgacgctgtattgaatccatgggatgtccaatattaagtaccaatagatattgattaaattagttaaataatggaatttgggtccatactgagtatggctttggggacatgaaaaaaggactaaaggttctatttagggctactggaaaagtatgatgtattattgcctttaatatccattaaaaaacccaaactcctctcctctcttcccatcaatcactgctgtccactcttaatgggtgaaactggttaaaatcagagacaccaaacaaccacatgagccagaggagtaagagtaaaagaatggaaagtctacattttagtggccactgctttggttgtgtcagtgtgtgtgtgtgtgtgtgtgtgtgtgtgtgtgtgtgtgtgtgtgtgtgtgtttccaaaacacagggtcatctcaaacccatgatagtcttgccttaacctccccagtgttggcattgcagacatgaaccaatatgtctagccaggtaactcgttcctcttactctcctgccaccccaccccaccccaccccaacacacacacacacaaaatgaactagaggaggcagtttagaccagggggtcttagtcttcagtgtgcatcatagtcaccacagagcttttgtctgtgcttcatctacaaactcgaatcagtttccaagtggatctgcaagactgggaagtaggaggctaatcttgctggactttggatcacatgttgaatggaaccaagagtggttctaaaacataggtccctgtttcctggagcccacaattactgaaataagggaggttctggacctctgtttccaccaattctcactaaagttccaacatctgctttcaaatttggctgaacattgacactcggttgggagttttaaagtttactcagcgctgtggccctcccttaaggagagaggcttggttgttctagattatagcccaattaggtttaaaaatccaaggtgatttgaatgtgtttgaaatcatggaggatgttgacctagataaggaccaacttaacggcattgcgttgaccaaaggagcctcttagcctacacagtgaggaggtttgccctcagttccacattcagaaagatcaggttgaggccttagaatttgcatttctagcaagttctcaagattttctggaccactctgagagctgctcactcaaggccaggagaagagagcaagccaagtgggtcagtgtctctcaaatcagaatagtcatagaaactgtcaaggatcctgcagtgtgttctggtggtgacaggtttagaagtgagaggttacaagactacatttccagcaagttcttaagtgttacctttgctgctaggccagagactctacacccagcagaaagaattggatcatttaaccccagttctagatagaatggccccatcaccaaggcagtctctctactcaagccatatgtagggctgaatcttcacagcccgggatattagtaaggtgtccttttgaatgccattgttctccagatacaaattatacacacacacacacacacacacacacacacacactcggatatatatatactggatatatatatatatatatatatatatatatatatatatatatccagtggcttatagggtatgaaagctgtcacagaatagacgtatctcttcctatgaccctggccccatatcttttctattgtgagcttagactttagcagctgatcatctctctagcccctaatctgtcatttagtgtgtgtttgtgtgtctcagagttttcatgtggaagtcaaaggacaacttgaggaagtcatttctctcctgccaccatgtattttccaggacttcagactgtcaggctcggagacaagccccttcaccctctgaaccatctctgtggctcccagactgtcctcaggttaccatggtttgtaagaaaacaatcaggacagttacttgagtcaaccgcttaccacatgtgcctaattaccatacagttaaaaaaaattagtcaaagcacatgtcatggtatcttaggtgaagtttattgatcacagcagtaacctgcactccctgggctaaccttcacggctggttacacatgtaaaatggtttcctgctcacaacttaaagacatcagagagaacagtggtgttagagacatggtaaattatctaatgcattgatttcctgcagtcctgaatgcttaaagctggggttgctatttgaaaggatccgtctacatacgtacctccttaacgctagccatgagggatagtggaaagaaaggcgaaggagcatgaagacaaaaatgtgatttgtataaacaaggtaagtccattatagtctccacactacacactggacacgttcacagggaaaaaaaaaaatctctcgattcagaactaatgcagcaaatcccacccccctagcagggtggtaggactcctggaggaaaagccaggagcagtgacgggtggattttagcgtgtcctgcgcatgcttatttatggtgcagcacttcatctggtgacacttcacaggctgcgcgccggcgtactggagagctttgaagaaaaataatgagctgagaggttcatgacacgctattaagaagtttgtgattggatttgggaaatcagatggatctccaaggaaaagggaccatttctgagccactgtgtttagggtatttttgagccccagagcagctatttatgagaagaaagagttgtttttgtctccaatccaggttctgacttgtgtgtagtgaggaagctgctgctttgcgcggcagacctgaagtccctggaataaccatgatgtcacccctttctcctgatctgcctttgactgcacagacgcatgctattcgctttgtgctgtttgagctgaattcccccacatgcagcctagcaatcccagccaaaacaaagtcagcaggaaatttcacagtggatgctcaaggtgctccaggctcagggaaatgaagatcacttttggatgcctgcattgtgctaatgatcaggacaggaagaaaaggcatccaaggtgggatgtggggatgtcgtccacgcagcaagtgagtgtctcggtgccctacatagtcacctttattcccagggcttttgtgacatatgtgactaaagaaagcactctgctccatttctggtggtgaaccaaggagaccttgttcctaaatgacagaagggccattttggaatgtgatatcataaaagataataatatctgaaaagaaaataaaaaccacatacacacagagtaatacataaccagacgagcacaagatgaacgtatggttaaaccatttattccatttcagatgacaatttaactctttgcatcccagagttcctcctacacacatgcagctttatgaggtggttctgtaacctgcaggttaaattgggaaggtctggggacacttgatagctaatcatcattctgaagcttagactgagatccactgtgtccccctcttctcctaccagccctatagttacagaaaggcaaaaatctcttccctgatctattgaaccagcaaacaatggggctgagcactcacactgtgagagactattcagagaaaataagaggtgggtttaaaaacgttctgctaatcaaaagcaacaactatggctgcatctcctgctttcttcagcattgtcacatgggtgatggtacatttgcaagcctgcaccagcccagctctaaaatgggaaagaatgtatttcatatgagcaaaacttttcttcttttttcttctctctccactgtgggaacatgaacttactttcagtcactcctgacatctgaccaccgtacagatcacgaggactctgtggtaaaccacaggcccacttgaaaatctctctcttaggcatggttcctgtgctgtagagggcagcatccctggctctcggctctggcttcctccaccgaggttccattttctctttcttctgctgctgacagtgagtagtctcatcccaagggcctccaattgggccccttcacaaagtaagtgaagagtaaaaatggcagcaattttcccatccaaagcctcaaaaagagctctgtttgtgcctggcattcttctaaacattgagagatgcatgaaaacttaaagctgggctgatgagatggcttgacaggtaagaatgtgaggatctgagttcagatcctggcagttacacacataaacagccgaatgtggctaagtgggccacataagggcagggaaggaagagaccagagtggcgtgctagtcaccagtccagccaaaacacacccagctccaggttcagtgatggatccaatttcaagggtataaggcaaacagcaataaaggtaaatgcatgtagacacagatacaaacacacaatcactaaataaataaagcttatttaattttaaaactttaaatctcttagaaagaggagagggtgtgtgtcttgttaatattgagttgaccaggcagaatttacatatcactccctctgtctgaatcatcttgttcctggtagctgttttacacttccaggatcctgccatctgcccactctacagaaacacagggaagcctttcaaaaacaatggctaggagcagggtggggtgggggtgggggagtggctattcaacccccacctccaccccccaaaaaagaaacaaccgattttctttcaccccattggtgactgctgtttccctggggagaatgtggtgtcattcacattgccatgggcttgcctcctaacaacctgccttattgccctcacgtcatcaggctgacaagaaagaactgagcacacagatgtggctgccctccatccaaagtgggaggggagatgacaccctgggcagtttgtcctactcagatgggatgtgtgtcactggaatataggtcagcattttgatggataggttgaagcaggccagaagcaagaggccccgggatccatcccactccactggaccgtcttcttgcccacagcaagttaagccccaatggccccgagagagacgtgcacagcagacagagccagtctttacattttgcacactaattctgtagaaatctgcagtttagctggggctttatcagcctgggtttgggccaagcttcaggctgaagttcagctggcctggccaaatgcagaaaggctggctattcacacttcccttgaggactttgtccccaacctctgatttagatagcacagtggccgggtgacatgcctgtagctggttagcataattgggtaaatgaaatgatgtttatttatggtcagttcaggtagaatcagaaaacccagcaaaggttcttttccccaaacatgaagtgagccaagatcctgtagcaagatcattgctttaaagggatttgggcaaatgattcagtttgaacacaggtgactgcttccctttcccccacagttcatagaagggcaaagattttaaataaaataaggatttccttgtgaatgcaaacaccagtgccttgatctggggtaacaaagattgcatgattaatgctgagcccacaggcaggatggcatttgggttttaacttggggaaaatgcaaaatatactcaccaaaagtctcccattgatcattgatggtcactgaatggagtgtgctcaattcatatctcaaaactcctagagcctagcatgtgactaattgcccctttgtctaaaacaatgaaaataaaagggatgagtagagggtattgcgctgggctgagaagttcagctagcaggcacagcatcatggaaaataagattccctctaactaggtcgacattggatgccttaataagaatcttgcaaacatgaaatctatcatttgccaaatagggtgtgtttgttttcccatcacacacacagtatgtttaagttttagtgagtttaagttcaagtttaagtttgttctgtttctgacatgaacccaggcagttttccacacgttatatgatttagcccttacaagaacttggagggaggttcgggaatgctcatcattattttgcagttgagattcacacagattaaagccctattgcaggactcctttggagatgagagtcaaacaaactcccctgggcgcttcacaacaacacagctgcctcctttaagcagtggcttatgtgatccactcatatataggtcaattgttatgaagcattacattcccaggggagaaaacctctactctatggcatgggtttctttaaattgtttacctacaatacttagacaaatgaaggtttaacatgtatttgaggtgatcataaaatattgttattctttctaatttaaataatgcgtgagtttgtaggtacactcttaaatctggtctgttatgtaacattctctagacataaaataatatgtagtttgttcgagacagagtcccatgacagcttgtgctggctttgaacgcactatgtagcatagtttggtctagaattcataatattcctgcctcagctagaattgttatggagcatatctgtaatcctagcctgaaatattggctttaaaagttgtaaagataaaaaaaatgttagcatgtagataattcagtgctaattcatgttcatattgacaggacacacaaaaggaaatcaacagcatcttagctagaattggttgccaggacttcttaaaatagaagaaagcggcatagggtaacctttactctaatttttgtattgccttttcaaaaaaaaataacagaagttacaaggaataagagaaaatagtctaaaatcctagagatacagaaattaagaatggattgcactggtcttcaaggaccaggggcagacaacaccaaaacatgatgaacaatgaaaactttaagaatgcatgaggcataaatcacattcagagaagtcattactgcagagactgctaggaagaaagagccaggaaaccctcacagaaaaggaacacttgagctggaatttctagacttccattagtggaaaacagaaggaagagagatctatgcaaaggcacagagtatttgatcccctgacatttggggcctggggaggaatgtaacgctgttggaagcagtggaggggtggtgagcatggacaaagaaactggttgtaagggcatgggagcttagatgcattgtgagaccaccagtgggtttttaagtggatttgagtttctgaagattactgctacagtggtgtcaagaatgatctgatcatctgatcaagagaatgaaaagttggttgtttccccaaaaaagtaatcaaacagacaaactcttggcatgatttatttgttaagaggcagaaataaacagtgctagatatgaaaggggacattgagacagaaaaagtaaatatttaaaagccataacagagtcatggcaacaacttgaggccaatatagttgaagccttagatagactgtgtaagttgttgttctgtttttttgttttgttttgttttgttgttttttttggtttttgatttttttgatgtaatgtcttgctatgtagcccaggctgccctcgattttacaaccctactgcttcagcagttctggggtgcaccatgtgtaatacccatgcccagccacactatccagattttagaaagcataagttatggaaataaactaaaagaaaaaaaaaaaaaaaacccttgactctgcaggaacacataacccggaagggagtgggtgtgataaccaaagacagaaataggctaaaggggaatattagatttagagagttcccagatatttttctttctgaaaattaagagaggaaatagtagcctttgccattacagggaatagtagaaaagtttacaaacatattaaaaaccattacaatcctaatatcaaggccaagtaagaacagagtgagaatcgacctaaatatgtgggcacacatgcaaaaatgctaaatattagcaaacaatctaaagtgaatgtgtataaaaatatcataaaataaattttaggtggcatctgaggatcacttagcaggaaaacatcacctatatgagctgccaaccacactgacacattgcctaggtaatggaaatggtcagtaaaattctaccccggcttgtgatgaaaaaagaaaaactttgccagctggtgtgactcattgttctgatttaattattaatttaggttttaaaaatctaaaatttctataaaaggaaaatgaataggttagaagggaaatgagagtggagcagaggaagtgatttgggaaaggtcactgtggtgatttcaggtacagaaagaaggtgtcgatggctggaaagtgcacacaatgctggagacagagcagaaagcagaccatagcaacgatggagtgggaagatcagtggagatgggcagttgattggatgtaggaggagggttgtaatgaagagaaaagagtctattaggactcagaactcgcagctttccagacttggtggctggatgacttttagctaattcaataaaacaagatagaaaacacagtttaaagacttgtctgaacttagcaaggcacttacaagggagtgcaataaccactgaagagaactaagtgtcagtaacctagaaaataaataaaacttacatatatatatatgttattatattattataattatatatattatgttattatatattatatatacatgcatacatacataaaactttgccttccctggaattcaattaatgtcaacaaaaagagtgagggaggacaggcagcagaatggtttctaaattctggcctagcaaagagtcaccacttaatgtttgctgaacaagtccagagctaccagcaacttacttactgaacaaatcagtacagaggttagagctgagatgcccagatccacagaaataaggactagggtatcttaaagtactatatagagaaaaatctatgcttagaaatagcagtatcattagtgatacatttttttctgagacagggtctacatagttctggctgtcctggaactcactatgtagaccaggctagacttgaactcacagttacacctgtctctgccttctgagtgctgagattaaaggagtttatcattacacctggctcaataaaaaaaatatttttaacattaaaaatagaaaatgagggaaagatatctttatcttcttaaatcctatcccttaatacatttctctatgtattttttgatagctgctatgatttgtgcactggaacttaagctttgcggtaagagtggcagtgctaacctctaataccaaccttgggagtttaaagcaggagaaatgcaaattcaattcaaggccaatgtgggtaatttagtaataccctgtctcaaaatatttttttcttttatgtgctggagatgttgtttggtgttgagcagtgaggactaatctaccatgctgaaggctcttgttagcacaagctacccagtagctcaccatgattatataatggttcgtgcccaataactcatcatgattgtataatggttggtacccagtaactcagcgtgactgtacaatggttagtacccatggttagtacccagtaactctcagtgattatatatggttagtactcagtagctcaccgtgatcctttggtggttagtgctctgcatcatggctttagcgcacggcttgaatacttagcacaaattatcatagaaataaataaacaaataacattcatggatggtggaatcagtcagttgctgagatgctctgctaataaaaagaccaatccttctctagatgattgacaatttatgatgtcacttggccataaggaactgtggagagagtattgggaaaatctgagtggcccagctagagttagggtaactgtttcataactgcccggtgtttacactcagaacttttgggacatcagatttcagatggcattagtcaggggccaaactcagatcagaggaagaatatactagaaccctttgccaggagcaatttcttgctgatccaacccaagtagcaagatgcacaccaggacaaaggacttttgaaaggcgcttggaaagagttcagttgctctgcggttaacccatcaaaggcatcttcctataacccagaggacagcagtcctcgacatgtgctggccatttggggagcagattcgtgcagagtagatcaaacactgcaggagagcctgttgccttggaagtacggagccttatgaaaatcattaagccattcgttgatatttatttgcttatgctgaacttcaagcacagcaagcaggaagttgaagacgagaactactgacccagtttcagaggccctagttcaagaaagggttcccctacatgcctgattttaaagagcctcctaggagaacatcccaccacacagttggcacagggaccccatctccctgtgtgttaggttaacggtcacctagagcttcatagaaaactagacatccccaagttggagaaattccacagaactaagaaaacccttgcaatctcagggccctaaccagaaaaagttatttccaaacatcttccttccccccactgtggcacttcatctggctcacttccaggcttgtaagactgggtagctccatggcacactcaataatccttcttagcaaaccaacactctttattggtgcctctcatcccacgacttggaagtgaacatggagttcattttgcacattgagagttagcaggtgattgcaatgaagccactccaaaccagttgtcctcaaccttcctaatgctgcatcccttgaatacagttcctcatgttgtggtgaccccccaactataaaattatttgcactgttatgaatcataattaagtatctgacatgcagagaatctgatacgcaacccctgtgagagggttgttctaacccccaaaggggtcatgatccccaggtggagaactgctgttctgaagcaaattgatgccatgggaaatctacctgccttcaaattcaacgaagcagacctcccctttcctcagatgtgaaattcctgctcaggggagggttggacagaacgccatcgtttttttgcccccagactggaaacaatgtgcttctctgagcagggggtggtctccaggcactggctgaagctctagacagtcaacaagacggctggactcggcttctcccaaagcattaacagagactgcaaatctgtgctcagatattcaacacatatgttctgaaattcattaagttcctaaaaaaaaagaaagaaaggaaaagaaaagaaaagaaaagaaaatgaaacaacttttagaaccagcagagtttgggtaaagttcagagactcaaggaatgcttctagactgttaaattcatttagctgataaatttgagaaattcagtctgggttgtaccacaggacagttgagttgctagagtgctgtccttgcctgccatcatacaagctttagaaaatgaactactcactccacatctatattctaaggaagagcttcctcataaagtcttccccaaattctcctgtttctttttcaagggagcgagtgtcatttggctcaaaattgtctactagtgtatagtgtatgcacatgtgtgtgcggggatgggggggtgtttgaatgtacataaatctacttgtttggaactgtgcatgtgtccaggacagaagacaaccttgggactgtggtctctgggaatcgaactcaagtccccacgcttgtaagacaagcactttactgactgagctatctccccagcccctcccttaaccttttgatagctctaactacgtggttctcaaagggaagaactattttgttcattaacttacatttaagggaaggcaatgcctccttgttccaacacacagtctcacacaaagcaggtaccaagtgaccgtctgtctgttggctgattgatttattcattggcaaatactaaaagtacaatctggcttttaccacatgtcagttacatttgcaatacaaaaaagtattcactctgcatttttacaggcctgcattctttgaaataatcatcgttttggaattggtttgaaattagctttggtgtcagtatttaagagagtagtgtgcttatgcaatgaaataatatatgttatcactacacctgtggcaatgttgctctgatgttttctgttgcttgacagatgctggttagctctcagtaggcctcagggcagctatttctgtagtagatgtggggcctttcatgtggctgtttctgtggtagattcactctttgggtattaccatttctgtggtagatgcccagccttgggtatggccatttctgcagtctaaaagtacttgttgcaactccttgaacagcaaaatatactcacaaagatttcattgctaaatattgttacaacggttctattatgagttattattaatttcatcctgtgcttaatttataatgcacactttattgtaagtctggacacatagaggaaaagtgtatatggagtttggtattatctgtggttttagacacatgctagagaggagggagggcaagaacaaattctttttaaatctgttaaaatacccaactatataatttaactgctcattaagtacaaacatatgcacagcacatgacgaacgtcaattaaatatattcaaaaaaaagacaaacataatttgagtatcttttaaagaccttgtaactatcaatgaccactttgcttggttccatctcacttccaagcctaaggaagttcagtctttctaaatgttaaagcttgtagctctccactcactagtgcttcagaggtcgctcctccaggagctgtacaaaaaacttaaccgcaaggccagacggtggtggcacactcctttaataccagtacttgggaggcagagaccagaggatctcagtgagttagaggccagcctggtctatagagtgagttccagaacagccaggactgttacacagagaaaccctgtctctcaggaaaaaaaaaaaacttactgcagctgggtccctcagtagcctcaggcctagcagtatcaactcactggaatggtattgaatcattccagcacggacagtctgctgtgtttgcacacaactggcacggaggagctgctaagcaagagagttatagcaaccttagaattaatagcatgatgccatttcgcagggtaccaggaaactgaagcaggaagagtcaaagggatctgtctgagagcgtgctgatgcccagactgaaccacacctgctaactgatgcttgtgttctgtgacctgctgcctccttgtctcgctcctccatgtgtctgtagcacagcccttcttttcaccagtgagttaaagaaaaaagttccatcccctgagaattagctgacaagaaaactgacccatcaaggctagtgtttccctatgacctttttttttctcaggcaggaaatggttgtttaggttcccggaaggcaaactatcccctccttctttgaaagggcttcctcggcttgggaagtcgctctgtgagagcccttccaggctgccagagcctctacctctttcttaaaagagccggagccttttctcctgtagaacctgaagacacaattaagtaaatctcagctgttagccaagagtgacacactacagatcctcagagcgtttgagaaatcatgccatatattaaggtcttaacataattcgggtgtttaataccaataaacacttaaatattctactaaagaggtggtagacattgatcaggcaccatcaaaaaaaatatgtgctattcgtaatttttcagtgaagtagatatgttatgattgattatacattagttggtgtttagaccaagctctacaaagggctttactaactgtgtagctacaggagtaattggtcacacaattacctcatattggctcatctcactgaagcccgtgcgttaagtttctctagacaaacagaaccagtagagtgaatatatttagaaggaaggatttactgggtagcaagctgctggctgggcaaaggtgccatcactgaacctgaccatctgacttgaatccctggcacccacatggtcgatggagagaaaggactctggcaagttattctcctgtctccacaccggggctggagtgcacacataggcctaaaaactgtaaataaaataagatgggattggttagactggcttacaagctacaggctgggtagtccaccggtggccatctgcatgctgcagagactgagcacctgtaactacttggtcattaaagctgtgtgcctagcaggcccaatcttgagctaagggcttagaggactcttggatgatcactggtccgatgtggattaaggaccagggtctctccagaaatcctcagcaccacattaggactagtgagactctcagcaatgaaaactgagaatcttcaaggttctcaccctctccagccttcaggtagccattactggactactcagactagacatataagtctgtccttgtaattatattcattctgtcagttctatttttttccctagagaaccctagtcacacagccatatatggtataactgcattaactatttcttttcttttttttgtcataggttctcatgtaacccagactggctataaactcactacatagctgaggatgactgggaactgctgatacttctacctctggccctagagtgcagggattgcaggcttgcctcatcataactggctcgttagctgattcctgatctccctgtgagccagtttgtactccatcttgagcatctccagacctttagctcttactgctcctgagatccctgcccctgttctgcctgctgttttactatctgtctgtcttgacccagtagatgtgaagtcccctgacaggagtaatcatctctatctttacagctgctagaggctggggtgtaacaacaagtctttccaagtcctgttgctacatgggcgatttctgccaggccgcccaagttctccccatgatcacattaaggtcccaagtaacacacagagaccaatattaggtacaaatgctgtttggccaatgactaggatttctcatctgttagctcagtcttaattatcataaatctatatattttataagacttatcggacaccagcagcaagcgtcctgtcttcccaggctcacatggtgactctgcactttctcctacctttcccagaatcctccttgactctttgtcccacttatcttgttttcctattggccaacagtacttcatttatcaaccaataagacaatcatatacacagaaggacccccccatcactgggggactggagagatggggtggggggagctgctgaggactgaggagatgcctgctttgcaagtgtgggaacatcagttcagtctccagaagccatgtgaaaacaggcaggtgatgtgttcttaggaccccagcacttgggaggtgaaagtgggtgtattccctggggttcacttgaaagttggtccagtatacttagtaagctctagctaggctagtgagagcccctgtgttcagttttaaaaggtggatgctgcctgaggaatgaaaccaaaagttgtcctttggcttccataattgcacacccacacagacatacacgtgccatacacacccatgtgcgtgcacacccatgtgcccattcacccgtatgtgcacctgcacacacgaaaagatgtgcacacacatacactaaaagcatgttgagtggcactgaatggaatcctgacctttcccagcgaccaggccctcggccagcttcagggttcagaacacaatgggtccttgtattcaccactgtgcatgcccactaacacacactcaacactcgcaaatatcggggacacttagtgacttcttttcaaagaggcttctctggcagtaaatgaccaaatttattgtgccaaggaacaagagaagaccaaggggcaagtaggcaatcttggtgctaggaatgcactcttggacatacagatgagggggaagcttgggcctgggcacagtgatggggaacggtagccttctcctcctaccccacttcctcttcctcctccttcccctgcactcaccctcccccccactgcaacagggagctacagagattggaattcaacctgcagagaggtcagggcctactcctggctggctcccacttcctctgtggtacctctcgaaggatgccctggtagcaagactctgatgctttctattgaataccaattgtactgatgagtttctgagacttacagaggaagttgattctcccccaaaccctcaagacatttcccaaataatgagattattattatcgctgctattattatttgcaaatcccatgacctttaaaaaatatttcttaaaggaacaaggtggagcgaataactttcagagcatatctgagatcctgctcttcctggtgattcggggaaaaaatgggaatgggttcttgagagacagacagggttgtcagatttggcaaatcaaaatatgggatgaccaatagaatccgagtttcaggtaatcaatggaaagcatgaagtataactgtgtcccatatgtggagtgggatatacttatgctaaagcattgatggtttctctgacatcccggtttccctggtcttctttaccagacagctctaaaccagagggaggcagagcaacaaatagatcccaccaacaaatgctcccttggagaccctagctttggaggacctttctttcaacccagtatttcccctgaagtgtgtgtgagctcagtattataggaaaacagtggtagaacaaacagggtgatgccctttcctgccctctgcaacctggggcacactgtaccctggaacagctgcaaaggaaagaggcttgccctgccaggaggactttctccttcctttggcacactgagttgtctctccagttacctggagagagactttcactacctgcttgtagactgccatccagtctggccggctaactacagaggtagagtggtggggctgagtggtgaaaagtgaaggagtagacttgagtgctggtttggatttctggttctgccacttcctactcatgaaacacttggcaagttgctaacctcactggacctcaacctttgcatcactaaaatgaagatgcttgtgagttttgtagagtatctgacaacaggaggatatgcggtatttatctgtagggagagatcccacgtgcctgtagcactgatcatgcccatttgagcatggtcacaggtatgtagaaggtgtgggataaaagagctgggaaggaggaggctcactctctttcggggttccagtctggtctcgaaaggctgctgagactaatctgggttttcggtgtaagtaatcttccacaataaataactaacatcattcttattctgtgtcctgttataattctttatcatttgtcacagtccctgacacatatctgtcacccctttcatatagtaaccattattgttattgctatctcttagtacttcatgaatcacaggtgacacctgggggtgagtctctttatgcttgcgacttaaaattgtagaatcttagtcactgttctgttgctgtgaagagacaccatgaccaaggcaactctcagaaaagaaaacatttaactgggccttgcttaaaattccgagggttttggtccattgtcatcatggtgggcatggcagcacgcaggcagatatggtgctggagaagcagctggaagttgtacaacctgtcccacagacagcaggaagagacaggcactgggcctggcttaggcttttgaaacctcaaatcccacccccagtgacacacttcctcctagaaggccacacctactctaacaaggccacacctcctaatccctctcaagaggtgtcactccctgatgaccaagcattcaaatatgagctaatgaagaccattcttactcaagtcatcacatgtaggaacatgggtgctatgagagtgttaagtccgtgtacaccagggagggatcccttgactggaaattactatattctctcctcaaggacccttcccctattcagctcagcatccgtgtagataatcgcatctatagtcaatgatcagatcactaaatagacctgcattaggtcaccacaaaaactcaaagggtgtgttaaaaaagaggagagagagagagagagcaccaaaagaagagacaaagggaggaaggatttcttgggtttctgtctataatcacctccttgttagtatgggtgtggcggctatctatgtggagctgcaatctagccaccatctattctagttttctctctctgaagcacacgaggtgtcgggagagacatcttcagggaggaaagagtttatttcagggtacaggctgcagtctatcactgggggaagccagagcaagaactaaagcaggaatcttaaactataaaggaatgtgtcttgctggctcagagaggttcatgctcagccagctttcttatacaacttgggaactactgcctaaggaatgatgccgcccacaatggattaggccatcaacaattaacaatcaagacaattccctgtagacataacaacaggccaatctgatctaggaaatccctcaattgaaattccattttcaggtaatcccaggctgtgttaagttaacattttaagttaactaggacatcatccctccagtcattgctctggttccctccctcaaacttcctagggggtagggttcagatttggtagagactcaagtgatccatgcctaagccaagcacataactgtattccctgtgaagaaatggctggagaagtggacaagtgacaccagcagaaataagcaaactccaagagaactagtctcaggtctcacttaagggattaaagaaactatggaacttccaccattgaggaacagaacataccagccagatctgctttctaggaggatagcacccctccctggattctgccccaggagacctttccccaaatccacaccatctcagttagtccccagccctacagctagaccttgtccccaaccccagaggactttcaccaagcaggcataggccacacaagccagaaagggtgaatgacctgaccaccagcagaactgtgcccctccctatgcagcccccttccccaccaacaccatcccagcttgttcctgaccctgttgctgctggaacctgctcccagcccaaacagacttctggcactgaggtgcagaccacaactgccttcacctgtccaccagtcaacaaggggccattccccagagaccaaacccaaaaataatataaatagaaggagaataattcctgctcaaaaacccagaaaatatattcaacaaaaccatagaaaattttcccaatctaaagaaggacatgcctatgaacatatgagaagcttacagaacaccaaatagactggaccaggaagaaaaaaatgcccccttaccacataataatcaaaaccctgaacatattgaataaataaagaatactaaaagtttcaaaaaaaaaaaggccaaataacatacaaaggcagacctatcagaattatatacgacttctccatggagactataaaagctagaagagcactgacagacctcttgcagactcttaagagaccatggatatcagccgagactactatacccaacaaaactttcaatcaccatatatggagaaaacaagatattccatgacaaagcctaatttaattaatatctacctacaaaccctgctctactgaaggtactagaacgaaaactccaacccaaagaagttagctacatctacaaaatacaggcaacagattatcacacatcagagggaaacacacacacacacacacacaccaccaccaccaccaccaccaccaccaccaccaccagtacctccaccaccaccagcaccaccaacaacaacaacaactaacaagaattaacaatcattggtcatcaattcctctcaatatcaatggactcaattctccaataaaaagacacaggctaacagaatggatataaaaacaggatcaattctactgctgcatacaagaaatacacctcaacatcaaagacagacattacttcagattaaagggttggaaaaagatttcccagtcaaatagaccaaagaagcaacctgatgtagctatcccagtatctaataaaataaacttcaaatttaatcaaaagagatagaggtgggcatttcatattcatcgaaggaaaaatccaccaaggtgatgtctcaattctgaacatctatgccccaaatacaagggcacccacacttgtaaaagaaacattactaaagctgaaatcacatatcgaaccccacacattaattgtaggagacttcaaaccccactcttaccaatggacagacagaaactaaacagaaaaaaaaaaaaaacagaactaactgatattatgactctaatgagcctaacagatatctagagaatgttctacctaaccaccaaagaagcccataaagccttccctaaaattggccacatactcagtcacaaaggaagtcttaacactaccccaattgtcatcagagggcctcatgcagttactgatggaggcagattcagaaactcacagccaaacattgggcaagataggggagtcatactgaggggagggaggaaaggattgtagggggggcaggaacattgaaaaaacccacagaaatggctagcctggcacatgagaactcacagagtctgaagcaacaaccagggagcctgcatggaactgacctaggccctctgcatatatgagacagtgtgtagcatggtctatttgtgggacttctgttaatgggaggaggggctgtccctcctgctttgtctggcacttggaaacctattcctcattctaaattgacttgcccagcctgaatacagggggaggtgcctgctcttgtggcagtttggaatgctgtgttttgctgatgcccaggggaggcttgccctcttctgggagaatacagaggagaggtggattgagggggagaggggcagagaagaggggacaagggagtgggagaaggggaggggggaggctgtgtttgggatataaaataaagtaattaaataaatgaagaggaagaaaaaggaaggtgagaaagaggaggaggaggagaaggagaggaagaagaaaagaagaagaagaagaagaagaagaagaagaagaagaagaagaagaagaagaagaagaagaagaagaagaagaagaagaagaagaagaagaagaagaagaagaagaagaagaagaagaagaagaagaagaagaagaagaagaagaagaagaagaagaagaagaagaagaaaaaactatgaacttttccctctgacctgtgcaatgaagtgagggtcttggagttgctataggctgcttatgaacgcaaacatgaatctattcaacaacagaattgcagtaaaaggaactcaagcactggcaggaatctaaggtcctgtgaagtctcttgagcttcctggtgtgtgcggtggctgccaggtggtaggtcaaatgcatcccggcctcgcttcattgtttgcataggctttcctcctatttgcagatctgtacaacatgtctccctggctgccagtcgttcagtgtctgatcagagccttgatcttagaatctgccatttgtggcttctatcactctaagctcacctcagcttgttcattcaccagcagttagaggttttagccttaagctcttatggagggtggcaccgctgccctaaaggtgtctccttgggggaatagaaagagaatacttcactgatgattactgtacgggagagtacctgccactctgctaagaattttacttcgtgaggtcactccacacacccgttttcagataagggaactgaagctccactactgaaggcttcagtaacaacatactgtagcttagatgctataaacaacagaacttggtcttctcaccatctctgaaggtggaaattggagattaagttgttagtggtggtagatcttccatatcccatctgcctgtcttgaagatggtaccttcacatggtctttcctctccacacacctgcatccaaacaccttggaagacataagatgtggtattggatgcataccccagtgaccttgtttaaattcagttctctagttagggctttatctccagatagagtgacatcattaggcattgactggttgtgaggacttccacgtgtgaattttgaggggtcacagttcagcccattgtggatgggtcaagtttcagggtcttagactgtggatggtgattccccatggggtcccagaactgaatatgcaggtagccataaacatggcaatagaaaaaggaagttttctgaacctacaacaactaaaattttgaaataaaatgcctagtgaatctgaggtgtctctagtatcacttacccatgctgtatcatgtgactttactgcagccttagatctgaacactttgcactgtgcatgccgtcacaccactaacgctgtctggcatacctcagctcatcatattcaagactgttacatgcttatgaattgcagtgatttgtactgtgcatataaacctgtttgctcttatggcaacatggtggcttagttacagaaaggaaaagacttagaatattctcctaccatccttcttcagcatgtaaatatcaaaccagtgtatctttgtatcatattagaatgtttcattttaaaaattgtaatttgagctactagcttgagcttcacacacacacacacacacacacacacacacacacacacacacacacacacaccattaaatgaattttagcttgcgattaggacagaatttccaagaaattttagcatggccctaagtagacttctgctgttttgtactatgtatttatgcaaaataacattctcagagttgatgattataaaatcaaaatatcaatcaactctgaaaaacactgtagatattctgtatcctgcagtatcagatattcagccaagatttaatgctttatgtaaaaataaacaaatctatctcattagtgtgcaatttgtctttcatctttaataagtaataaaattacatgtatccaaggaattatttaaaaataaatttctttatgacttagcctcactaaatgcttgattggtatatattttatatacttgtatactcagtgttacaaaattttgtcaagttgaaagagatcacaagtggaaaaaagcctacgagtatctaggttaagtaagcccccacctccctgcttattcaggtgagcacacaaaggagctcagattcatgcttgggtttgtgtgtcttctgagtccaatttttttttataatacatgcattcatttattttcatctcaaccagatgagaaatctcaacatctcaatatctcagtcactctgccaaccagcaccaccaaagcttctctgatgggtagtaccagggatgtaaggcagggaagatgtcatacttcaccacagaaccagaaacaacagaagcagggaaaaaccctttggaatcaggagccaaaataattctttcctcccttaagaggattgcctcaagtattttggtacaggcacagaaagctgacaagagttatatatgattttttgtttagaattagatattaacccccaaatgtctattttatatctatggatagatataaaatgtgtaaatagttgagatagttgcatatatgtgaaaatattgtcaaacttttaaaaacaaatccaaaccttttccagtcctaatcatttttgaatacaggattttcagcctgtactaatagtagtatatcattatttctggtgaggagtccttgaaataaccccagcaggtatcagagtggtgctgacacatagccatgcctaagtgtaggtcagctgttctctaagaatgggcagcgttcttagaagtagagaagcaaactcagggttgagagagatgcatttgtggacagaactgatgcacagttcttgccactggacgtaatgatttatgctttcagtccacttaagtggtagtaccgttcacttttgtctagagtgttctcaagcagttccattaactgaaattgctaggtcaaaagaagatctgtttctcagagagtaggaatttatgttaattttaaaagcacaagcataaactcaggaaaagattgcacaatccctgaatctggagaaagtgatgggtgggtgggttggctgagccttggggtgtcacaagttcagaactgaaggctgaaacttgaagagggagagcacacagactggtgagaaaatagcctgtgctactggatgcccgtgttagcaggaagaagagcaagagaatttagtggagggtattaagaaaaggaagcacaaagagaaggagtgaggctgctaaagctttgccaccatgcacattgtgttggtcagtgtttcaccgtaacaggagcctaaggtgatccacttggaagcagaacagtgtactttggctcatggtttcggaggttctaggctgtggtcagttggctctgccaactggcatcctgtagtatgcctgctacagggtggagcaaagttactaagcccatggtcagaaagagaaaaaaccaaaaaggagggaaacacccttcaaagaaacacctcttaatgacctgaagacttccactcacactccacctctcacaggcttcaggaccttctcatagtatgaaagctagataccaagccattatcacatgggccttgaggtgacacccaacgcagcacaaaccagaagggaattcagggagaatagtgataacatttgtgtcaggttttacaaaggaaccaaaagggaagtagcagagaaaatacggccatgtaacccaccaacaggacactgtggtaaaagaaagaaagaaaaaaaaacgaaaacaaagttagttccagttaaatgatggtgacaaggctcatttttagaatagtggacaatgagtgaacatagatggaaagacacaaagctgtgtagttgaatgaagcaagattccattcaccaatgctggtcctgcatccctctggttaagcagatgatgctgtttctcaagtctcttaaatgtgaggaggggtcatgttgcagttctgtagtgaattctgtagtgaatttgaagtctgtccttttactggaccaaagcagaaaaaaaaaaaaaaactatgcctggatcccttcctccttcctctgatctcctcctcaatgtcattctccttttctctcctccttctttactcttcctcctccttcttctttaccccaccccaagtggttcaggaggagagcctgtgcatagatgagaaaacccaaagattaaaacacaatccatgacctcttgacaaactgctgagatataaaaatcatttgttaccaccgcataacctaagcctatccttgataataaacattaaatctaggaatgtggccaaagagagtagtagagttgaggaaaggagggttggttggttggttggttggttggttgggttttttggttttttttttttttttctggttttgtatttgatgttaccaaaatggaaagaaccatggtggaagacaatctttaagaaaataaacattatttttgtttgtgtgtctgcatgtggtggtcagagatcatcctcaactgtcattcctcaagagctatctacctggttttagagacaaggtccctcactagaatttggggctccattagggtagattagctcgtcaacaagccctggggatctgccagcctcttgcctccccagcactagcattccaagtgctcgtcaccacacctagccttttatgtgtgtgctggggattaaacactagtccttatgcttgcaccccaagcactttaccaactgagttgtccctctggccccgatgaagcaatgttgtaaagaaaatagaatatatggcaaagcaaagctaggaggtcagcctctgcttttcttcttgtaggggagaagtaaaaatccaggaagaatgtcctaaggtttgagttgaagagggaggtggaggaagtgtgccctcatcagtgcaggtacttggtttctaggacaacgaagggtgcaacttggagttctttgtgtggggcaatttcaaaagatgatgtgtgtcttcacctgaatgaaatacacaggcaatgatcacctttgcaggtcagcttgctggcagtctaggatgactggcaaagactgatccaatctgcatttgacttagttaaaatgagtctgtttctctgccctaaccttcccctccctctcatgcttgtctatgtaggttaactaaagtgttattccattgacaggccaatgcggatccccgacaagacaaaatatgctatgctctctttagagtgcactcttggtgaactttgagccacacatctgttgcagaaaaggagcttgtattctccaatggcccacattagctaagggtttggggtccatctccactgggacgtatttttcttagataggctgttacagaatccaaggagtaaatttagttctttatcacactacaatcattacaatgtctcccaaataattattcttttcatccccttgatgccattgtaagagtcttcctacaaatggatatttgggttaaaatcagtgtacacccttctttcccctgaaccattgcaacgtatggagtaagtaaggatttatttccaaaacctccccaagcctcttgctttggttaagacctgcagttgctattttctgtaaagagtcaaagagtaaccactgggcttcaagaaatgagcattcttttgcaattagtcagcagctaacagtcagggataatatctgaaagaataggcatagttgtgtaacaataaagtttaatttacaaataaagtcagtggtatttgtttagtttatggtctatcctttgctagctatgacttaagtgttgttaaccaccagaaagacttcaggtgtactgacagttcaaaaaaatagtaaaaataatattttaataaactgtatttagcttatttgtcttttagaaggaaaaattaactaaaacatcagttttgttttgttttgttttatcctttggacaatagtctagtattttcccttcctaaaaaaatctgtattttaagttagatgtctcttccctaccatacacaaaagaaaaaaagggggctaagcagagcaatgggctttaattcagagatgagagagttaaatggctaaaacttggagggtgaaaataccactagtctgcaaacacagcctcttctttagaaatggatttacccagacagcaaattgtttataagatatgtagagtaaaaacaaatttgctgaccctcattgcagagatcaaaggttaaattcatcccccgtaggatggttctgttaaattgctcccaagctgtctggtgacatatttttgaaaaaatatttctccccaactttatcaagtgttctttgtgttctgaaaacatgatttgatgtcccagctggagtggagacttcctgagtctaagacagttgaaattctccaaccgtatccggagccacagattagttaggataggcattattacaagggtgatatctccaagtctacttacttatggaagactgaagccgatattttataaccatgtttttttatgaaccagaagtagataaagagctaaaattgtccacttggatgtccttggcattgagttgcacaaatgttttagatagtaatgtctggcaacaaacgaatgttcccaatttttatgcccctaagcaagtcacaaaatgaaacttcacagtttaaaagttaggaaaattgggttgaaaagatggttcagcagttaataacacttactgttcttgcagagaaccaagagtttgttcctaaaacctagagatacaaccacctccaactccagatccaggagatgtgatggctctgctggcctttgcaggttcctaaactcacatgatacacatagatacactaagatacacacacacaaataaaataaagtattttgggttttttttaaagacagggacacacacacacatataccacacacacaaataaagtaactttggttttttaagaaatggtttctttcatgtagtcttggctgtcttggaactcactttgtagaccaggctcaaagaaactcaaagaaatctacctgcctctgcttcccgagtgctggcattaaaggtgtgcatcaccatgcccatgtgtcattggagaccagtagttgacatctggtcttcaccttcttttctgagataggatctttcactaaccctggagtttacagatcatctagactgatttacccaggagtccacgtagttggcccctgatgtcctcctcgtcttctccttttttttgctccccagtctctctttctcaatttctatttattttctctgcctggcagccctgcctatccattcttctgccttgatattgacagctcttcattagaccaatcaggtgtttttaacagggaaagtaacacagcttcacagatttaagcaaatgcaacataaaagaatgcagcatatctttgcatcgttaaataaatgttccacaaaataaacaaatgtaacacatcttaaaataatattccacagcagccctcccctgctcccacccttctgctggattccagatctttgccactacatttggcatttaggtgagagcaagatccaaacccaggccttcactctgcagagcaagctccttagccacggagccaacttccagtccacacattttttaataatgcaaattttctgtctctttacttgaaagcttttacaaaaccttccaaaaagcagaggttcaccaaatttatttactgacaaagtttcacgaagtcttattggtatgaaaacaagacaaaacaaaacaaaacaaaacaggacaatggtgtatgcattcaattttaaagacccatcatttagtctgatataccttctctctagttatgttaaataatcacattttatgaagtgaaatagttatttagtacaattttacagtatacaaaccctgggtgagtcgtttatgtattttttttaacttttattgattcttcgtggatttcacatatgaattcccatctccccatcccctctcattcaccctctgcccttgcaacctccccctaaaacaaagccaaacgtcaaagaaaaaccaagaactaaacaaaacaaagaaacaacacagaaagaaaaaaaaacccaaaaacaaaaacaaaagagagagagagaaagaagaatcttgtcttgcaagctgtaatgtggccctttgagacacagtttaccctttagaccattcatctttacttgcaagagtttattaccaagagccattggtccggcttgaggcctcaggtttctgctataccatcaataatggcctctcactggtgctccccttgggtaccctgttgttgccctgtgtcatggagatcctgctgttttggagctgtaggttcatcaccttcacatgccccattagttcttagacagggtggatgttggagtgggccaactcacagccctggttccgggcctaggtggtaggtgggttggtcagcccaccaactttccctcaccattgctacttggatgagctctccagtactgtccagactaactcaaccaatgcagcctgcagcaaggagaggggccagttctcaggtcctcagatctgggtcaccctaactcccgccaccagagccagctctactcttttgcctaggtgaggtacagggctctcctaattgctgtaaggaccatacagattagttgttttaaaccataattctattgttgaatgagtaagaaattgagtaaagagcaatattactgaaactgtaatttcttctattcgtcccctagataggaagcaacaacccaagatttcttctctgtatatttcagagagtatgtttgttattgtaggcttccaaggatctataatgtgaaaatgaagttcagggttttgtcttttgctagcatgattgtatacacaagaagaaggttcattgagatgggaggaattacatgccacccttcctcactggtgggtataaaaactgcaacaatgacaggagtacaaatgaatcccagatagtctaatggatgtcattccactgatatcagtgtcatatggtgtttggtgtgtttatggggggggggtaacacacattcacgtatgcagacccaaagttgatatcaggaatctttctcaattgttctttatttattgagacagggtctctcacagaactctgagctcaccaaatccaactgtctagccagccaagctgactcaaagaatctggtgtttctttgtccttaatgctggaattacaggcaggttgctatgcctacccagcatgtacacgggttctggggatctgaattccaatcctcacatttactcagcaagctattttatccactgagccttgcctttggctcacatagtgcctgttttagcatagaggagataagtggcaattaagacactgggtgttttcaaaaggatgcatgctgggtgacctttggtgtgctttatcctcaccaagagtggggcttccaaatctataaatgaagataatgatacgcccaatctcatggaagtcactgagtgatggggaaggtccttctgtgtatgtttatcttcttattggttgttgaataaagtactgttggccaataaagaagcaagttaggccagactaggagttaaggaggattctgagaaatgtagtaaagaagtgttgtgatccaggtaggaagtgacatagcaggcagacttatatataagcaagggcaagaaggaagtcgttccttttttctcttcttcctgctctctggtccggagtcaccatgtgagcctgggaagacaggacacttgccactggcatccaataagataagtgttataaaatatatagatttatgataattaagactgagctagcagatgagaaatcctagtaattggccaagcagcatttgtatctaatatgagtatccatgtgttacttgggaccttaacgtggcagcgggcagaacttggggggcctggtggaaagcgcccatgtggcagcgggcttgggcagtttgggtggaaagacttattgttacaactgaaagattaaataagataatggttgtaataaaccagtttagttttttggcataaaataagtgctcaatcagtgttttcagttactattttagtatgttaaaaagagataaaaattgatgctttttattcttggaattgctttcctaaatggtgaggctgaaatagacaataaaattagctcagttttctatcaactactcccaagataacagacaaagctgttgatgaaaaccatctccttccttgtaaaaatctgtcatcacacatacatgtatgatggcaaaggctgatgaacttaaaagcttaaaaaactattttcttgagaggtggtacagtatcagttgttccagactcatattaaaatgctacctttcatcaaataggagaccccttctcttgtgctggtgagtatcactctctctggtcaagagagagaaaagacaagtcactgggccagactccacagaagctatgggctttcgaacgtatagatatgccacaaaacaagtcacatatttggcatagaatatgcagatgtccagaggataaaagctcattatcaactaattgagttgataaaactgctttttcttgatgccgttcagaaagaaactattggaaagtctaaaactggaataagtttctggagaggagaagtgggtgacattgagaacctgaagtctggctcaagttctgccccataagctgtgtccccttaagcaaatacatatcttatatgtaggtctcagccataccagagtgacagtgccttaagcctgagctcacaaggtttgaagagacggtaaaataaaaatggtttatatctggccatggtggctcacacctttgatctcagaactaagaaggcagagataaacagatctcttgtgagttagagaccagcatggtctatgttaaagaccaggccagactgggatatataatgagaccttaccagaaagaaagaaaaaagagagagagagagagagagagagagagagagagagagaagggaagaagggaaggaggagatgcttatataaaattattttcctcatttgagaagatgcttcagaaagtaggacactgtaaaatcccctttaggaaactactattgttttactaaattgacttcttgtgcccaccaaactgccttctaaatatctatgtatatacttatagattagttgctaacagatatagtaggagtttctttttgcagagggtggcatttaccacagagatgtaactggtcaaaggacaaagaaaagtgagtgttgagtgctcagccctaaatggaatatctatatcaccccctctagggctcagggaacatctcagaagaagggggaaaagaacatgaaagtcaaagaaatgaggaaaatagaacactgaattccatgatgtgaccattgtacttttgaacttatgacagctgtgattacctgcgcaggatggagccaaagagcatcattgctatttggttggactcatgacaacaaagttggactcatgtggccccgccccttctcaaacggttatccagtaatggaggatgaaaagacttttcctcagtggagtagccactggtaagtcatccatgctcatgtaattaactcctcatccatgctcatataatcagctcttactaaactctctctctctgtctctctctctctctctctctgtctctctgtctctctgtctctgtctctgtctctctctgtctctctgtctctctctctctcttacacacacagagagagagagagagagagagagagagagagagagagatgaaaataagaagaggtgtggaggaggaataggaccagtgggaatgggaaggggacaagagaaggtaatgagctagtgaatgtgattgaaatacattacgtatgccacaatgaagcccactattttgcatagttaatttttaaaggagagaaaaaaatctggccaaaaagttgtgcagcctagcaggagcgtctgagaaagagtaagttcagctgcatgtaataatcgaatgaatatatcactaggggagatgtgtcttatctatcacttgaggaatttgaaaaaataaagttggttattttcatcctagctccttcccctactagtaatcctatgtcaaaggggcgtgtcccaagatgcttcatgaatgactaaaattatggatggcccctaatttattaatatatgtatatgtgtgtatatatgtatatatatgatatagtaacaaattaagactagtagagaaattataataatttacaataaactgatggggtttttttgtttgtttgtttttaattcacaataaggaatccaggcatggtagcccacacttacgattctcgcactcaggaaattgattccgacaagttcaagatcagcctgagctacatagcaagtggcaggatagtcggagaatagccatatgggatcctgtctcaaaacaaacataaaaacaaaagtaataataactattttagaaataaaaatgaaagttgggtgtggtggcacatgcctttgatgccagcactttggaggcagatctctgaggttgagaccagcctggtccatagagtgagttccaggacagccacagctatacagggaaacccactcttggctggggggctgggagggaaggggagtcccttataagctaactagcacttcctgctaaaccccatgactgcatctgtttccagtgtcttcagaggtgagtggatcctgacttttattctttttaaacaaaagaataacatttggcaggtaacaggggcaggccagcataatgcctgaacctttcactgacccttttttttacttattcattcctgagagccttgtggacagaccttgctgtatccatttccccattcatggatcagtacctccaaaggcaggtactcatacccaatagtctttgataactgaaatcattcgaagtgatgcagaacttaaccagcatgggttcaattcccagcaacaccgcgaaacaaaaataaacaaaaccaaataaatacataccagcatccgttgttcatcagacattacgttaagcccctattttaccacaatggtaacaataagaacagtattccaggtggtctttaaagcatttgatatcaataacatagttggatgtgtcagaggttaggtgtgggatcaagtgtgaaactaaaagataactgcagccttgtgcttgatgccaaggagtcgataagccaccaggagcttgctggctcataccacccaccctagtcactgcccagctgagggagcttggatggaagcttgtctttacttctactagatcagcatcaaagagaagtcaatgggtggcttaaaccttagacacatggctgaatttgccagaccttccttggcaccatccacttggaaccccaccaggttggacatctggtcctcgccatagttcagttactgtgttagtcgactggggaaggggagcaaatctcaacaaaatgttcaaacacctactacttgagaattccgtaaactgtccaccatttggcttctactgggcgtgcgatcaacccaggcagctcacacactctgagaccatgggacagtgacaaaaaacgggttgcatttcacacgcctactcaatccacttagggtagtcattgaagcacggagtcaagggggaatcctgagattgtcacggatggaagaaaaatgtggcacacttgattagtgacaactgatgcaggcgcagacacaggggccgttgacattgacaccctgtgtactgggacacatctgacacaactatttgttttacagaggaagaaagactactccaaagtggaaagcagtaccctcaaaaccacctggcaagcgagtggcagaactacccgctttccatccatctccttaatgccttggctcctggtatgtgataactactgttcacaaagccagcagcaaaagccagcaaggaaatggctttatgcttagtatggtatttatgttgaccatatttcattctagttccttgaaaactgctggttagtgtaatgtcactctcctcatcagagtatctgatttttcagagcaggcattccctggctgggctgggtattgtaaacaaccatcccccaggcaagtggaaatttattcaagaccagagaaaagaagacaggtcaaaggctgaaccctctttgtgatgggccagtgacaaaggtttttatagtggtgctgtttgccagtgtgacctgggcttgtcagtaaaaatctacacaatagaagacatttgaaggaatgatggttctcgaaacagcaagcacagctaaagtgagcctctgtggccagatttcatcatctttaaacattcctgaaccatgagctaatcaagacgagccctgagggacaagtgaggatacaaaggtacaaaagaagagagagacatgccaggttgggactgcaaacccaaaggcttgcaggccaaagaggcctgtggagtcttgggagaaatttagaagcaaacacaccacaatgaagaccctggactttgtacttcttaaacttccagctgaattctaactctgccactgttaactgcaagagaccctggatctctctgggtctctgtttccttgtcataaagtgataatgacacttaccttttaagatggtgcaagaagtgatttagataattatgttgagcatgcattcgtcttagaaggccattagtaggtgctcaaaaaatggctaggtcatgcacagtgaacaggttcatggggggaacaatgctgggccaggaatgagaaactctggcttctgttcccagctgggttacaaatggactaggatctgggatggtaactagtaaacaaacatttaccgaatggatgaactcatgaataagaaaatacaagaagaaattttgcatatccttgttaggtctcagttttctcatctaaagaaaactggtctctcccatctcttctaatgccaatgttcacacagctgaggcacctgcatgagtgctatgccattgatggatgatgtaagctcaggctactgcccatatcctctgaagcccctaagtttaatcacatcctaaaccttcaccctgcccacccagaaatcccatcacactctgttcctttttaaacaagggggatccaagaggaaggtgaagcctgagaatgctcccaacatgtgctacgctgtcattagctcagtcctcaccctgggttttcaacctcctcaactgtgaaccaggatctcccaattagagagctatgctacatgactcccatgaaagtcagagctctccattcaccttcgatctcctagaaccctccagtggaccccagcctgctcagcaggaagggtggtgggagactttgcttagctatagggcaggcgctaattcagctcagtaactgccacatgttccctgacttcctcttccccaaggagatagattttcttgggatgggctcaggccccagagcaggaacacggagacaccagcagtcacaggatgagagttcaagaggaaatagcacaagctggaagtaattgacatgtcactaatgctttaaatatgcttgcttttgtttatttatttatttttgaaaatctccacgagtcacagacactgaatggtaagtcagatttctgtccatccgtcccaccccacccccactctcccaccctccccacatcctacaccccccaccctcttcttttggggactccagaaggagaagctttaataagggacacttttacttggcctttaaatgtaagtcttcagaaggccccagccctatgcccacaaattcagggaaagcagtcccatgatcccacagtacagggaaagcagtcccatgagctgctgggtcctactcacagatgaagaaggaatggggaggcaggaggaaggaatcagcctgatgcatctggtgggagctgatgaaagcagagtcacaagactccagaagtaaaaggggccatgtgtaacttccatgcttgccagaaggaagtcactaaaagcttctaagcaggggacagacatttggaaaatcctgttgctgtaatcgggttccagtatcttttatcagaacagagtagagtaatcgtggcatcaagggcacattgacctactaataaatcaaattcagacttggaacatgaaaggatgttattttctagcttgtgtttaattcagatttcaagaatttttcagtgccactgaataccatttagcaatggttttctttaattgacgaataattattaaatacctgctatgtgtgcattcccccaagacacataaggaaggaacaaactgacagcctcatcaatgcaagcattatatatatatatatatatatatatatatatatatatatatgtatatatatatatataaagatctaaaaaccaaaaggaaacaggacacaactcattgccccaggagttcagaacacatttgtgagataagcaagctaataaagaagataaagaagtctccgaactggaaaatcctggatagaacaggtgcatgggaaagagtgcaaaggagacattccaggccaggggacactgagatggcaaagatctaggggtaggaatgaggacagtgtttgtacagtggagatggcatctatcatgatctatcaagatgaaaatattcagaggctttactggcacaaagtgggaaagtctttctggtccctgaggcagagatcatcaaattttaatggttccttaagaagctgcatctggtcaccgtgttcaggttggtcaaagacaggagaactgaggaagtagtcagccagctgctccactggagaacaaaactgaagagatagcaccgggagctaagcgccgcagaaactatcgtaatagcaggtttctgttgccccttccaactattcaaggactcagccagctgttcaagccatcaaaagagcaaattggacaccggagcgctaaatccctgctcataccagaaaatgaatacttctggtgcctaagaggagcttggagaatagagcaaaaccccagcaaagtgtgcttcccatctgcagcccacagcccaagccacccgcccaccattgtgggaagggggattaatgagatacagaccatctagggcctaaccttatattattcatttttcttggaaatgtctgaggttctgtgatccctctctaatcccatatgccatatttagcttaaattttgacagacataggcctggttgcttgagctaacattgactgtctttagtgtgtgctgaggctgggttgccatggctaggcagggcacaattccagatagaatcactcagccccagagcccagctctgagtcactaatcagacaactggaaaccagaaaatagagagtctttataccctccccacccctttttctttctttcttccttccttctttctccttccttctccttccttccttccattcttccttcctctttcttttttcttttctttctttcttttattctcctttcttcctttctttctcttcccttttatatttgaaggcagcaagagtttttctggtgttagacagaattacttcactgagttcaaacaagctgcaaagaattcttgcctgctttgtgccttttctcctcccagagtgtcttcacaactcaagcttctctttggagctgagactgttcaactttgctaaatagctacaatttatctgccacccagtaacatgcacagagtccctgctttgctcagaaggtttctcggttttgtttgttttggttttggtttttatatctgatggtactcattatttggagaggaccccttctggaccacgaggaagctaagatgttccttggggaatttgttgtttttgtttttaggttaaaataatgaaacaaacaaaacattttaagatatttatccagctaacaaaaaaaggtggtttctgcagaatgtgtcatcctttgagaggacctgagtcacattggtgtcacctgcaccactcctgtctgttcttgaattgcctgtcctgtattgtttgaggttgtttgttgttttctccttgttttccaggctctagtaccagtgagtgctataccactcaatatcacttcttgcgagtgacagccggcggagtataacacaatactggccttgaaagtgttcttaacatcttgcttaataacaactcaaaatgctgtttgaaaagcagcattttctctaggacctgaccttgttctctcccaccaactcctccttaccacatgtcctctcatcgtgatccgcctcaggattgcactgctgtccaccctggagtcttcttgggaaccctaaccaaggtcagcatacttgctgtggtatcgttgccctctctgctgcttcccctcatcagtggataccccaggacacagtattctggagctggacatacttcttgatagagtcactgagttcctgggaaagcatgatagacatctatcttcttatttgtttgctggattgcataggccataaagtaaaaagaagaacaaaggtaaaggtaaagaataaaattaaaggggctggagagggcgctcagaattaaagaagagcgctgactgccaggctcaatttccagaaacccgcacggtggttcacagccatctgtatccagttccaggggatccatgtacataatgcaagacatacagcaggtaaaaacactcatatatataaaccaaaatattgaaacaagtgaacagaacaaatatcatatagctaaatagaaaaaaatgacaccaataagtataaaaatagccccccatgcatctctgtgatgtttgttcataactgtattttaaatgacttcacaaggcagatagatctcccttcatcccaagcctgatgctatatagggtgaatggagaagaaagagaaatgataattgcaccattgattttgtagcaaaagatcgctgagatgggtatgtcttcacatcccttatatttaggactctttgcccttgcttccagctgccagccacagggatcacctcaaaaacaggtgatatgaaaatattccaaccagtgatgaccaggttcaagttcttgatgaataccttgggaagaaaactctgacagcttttgttctggaggacctaaaactgaaggacgtaccacagctattgcctgtgatgtatgagactaagctgctgacatcaggaaatggggcggagaaaaggaaatcgagtcctgacaatcgctttgagctcttaaggcagccgtgctcatctctgcctttcaatttatgaaagctaactaatcctgttttcctttaagcaagttctgcttaaaattttattacctgcaaattaaagtgacctcataatattaaatccagtatcaaaaatgaagaaaataaagaaatagcaaactttaaactaggcacaggcaatccagaaaaaaaaaatgtctaggatcgtagaaggccaagcacagcatccacttgagcctaaaatattccctacaaaatgacccactggatcatgatgcaacttcagataaaaataattaaacaaacaaacaagacatccggtttctgctgggaaccatatgtattcaattggagagtttcaagagaaactctaaaaagtgtctgaactcaagatggccgctctggcaggaacatggaagcggctgttttacatctgccttgatcaagaaaggcaacaggatagtttgctgaatgttcaacaaggatgcttgcaacaaccgtattatttaaagcttctgtgacttcttatttgagagggttttttgttgttgttttttgtaatccccccaaaagcttggaaagaagccctcagggccagaaataaaggggtatggttcttccagcacacaagcagactgaactcagacaaacgggagattgtagcgttttaaagcgggggccggagagagcagatgcattaggaatttggatcaggctcaccacagcacattgtttggtcaattcctggtagaaatactgccctccaaattattttaaattttatgtagccatgcatttgccaaaaaaaaaaaaaggacttcaatgtggtgctagcataaaaatcacttacagcaagcacagtttagaagaatcctgggactcaaagctttcctgccagccagggatggtcccgcgcccattccaacagggtggggtcctggtgatggcaggctgagaactagagagatgacggggcaaagccaaagtgtttctttacattaagagctcttcattgtgtctctcattctctcgagtcccgggagcctttggaggatctggtattgtttagttctgcttctactggttaaacagcaggaactgtttaaaaaaaaaaaaaaaaaaaaaaaaaaaaaaaaaaaaaaaaaaaaaaaaaaaacaggacaggacaggattaactcaatccagccgacactcaaatacccaaattcggatcttttgtgtaatgcatgtgccaactatcaaagcattccacctagagagccaaaggaattgtcctgtacctcagttacttcttgtgccttgattgagatggcccatttgagtatcatgtgtttatatcagaaaaaaaaaaacttctggtacctttaattatcatgttggaaaacatgatatccacaatgatataagaagacaagtaaaaatcaaggaatcaaacctgtaagatggaaggctttgaataaatatattgagtagatgaataaaagcataagcaaaagaatggaatgagtccctaggttggataaatggttttataatatgagacaggggagggaggcacacaacacaacaacacccaactggagaaccaaggcaatatcacagttgattgacaggacaaattctaaaggcacacagtgtttaacaggtaagatgggagtactcagtagtttctatcatttaccagacaccagtgaagataagcaaacacgaaaacaaaaattggtattgcaaattagttctctgggcaaaacaaaggtcacagagcaaccatcttgtaagggttcagacaggttcttggggctaaagatcaaagaactggcatcaacataggaagaatttcaacccatggatatgggttaaacttgcttggcaggggaatgggtgttgaaataaaataaattatgtggcatttcaggggatgtgactgaatctaaatctctaatctagccacatctcatgtttctcctgccatgttgttggcttgtaccatcacctcttgtaaaattggaacttgtctctggatttctagcttttcacttttttgtccactgcacttaagactacaagagtaatatttttgaaaatgcaaatcctcttagttccttccccttgtctgaaactctgctatggtattcactgacagccctgactcactagtacagagtgggatcaggctcgtttctttctctagtcctcaatctccttgccccatccctacatcactctaccctccagataccttacctttcttcttctctagatgtgcatgctgtctctcccccaggccttcacacctgttgtctcactcaccaagaaaccttccccctggtcactttctcttcctagaccagatccatcttacatgctactttgtctgcagagtgtccagggcttacgtggccctgcaatctctttcacagagtatgttccactatgtgaccaggtttggtattccaccaccatcaataaccaatcaacaaattctgtaaggaaagggctcagcctgtccagatcctggcacatcctcagcagcaagtataatgcctgacatcagatagatactaaatgcagttttattgcattgatgggtggatgagatggataggtgagtgggtgggtggacacatggatgaacaaataagatgagaagaaataggattgtggaagacatggaataatgagccaaagttttataattttaccttgcaaccatgtgacaattaaacagttctgggtacaaagtgttataaaataggaaaataaaaaatactcaagaaggaacagatatcattgatttacatgggagaatatttaaagaacaaaataaagttcagttcacagagtattttttaaatgaatggcattgttgagatggctgagcacttgctcaataggacccagatttggttcatggcatccatatggcagcatataagtatctataactctagcttcagagaatctggtgtcctcgtctggcctccatgggcgccagccatgtacatgatgcacatatatacgcataagcaaaaacactcacacacataaaatttaaaaatattttaaaaggagccatgaagtctacaatagacagtctagaaatactttagtatttatattaactattacagtgacacttcaggatcaaaaaaataaagtataatccaaattggtcattggaaatatgcatcaccgttatttcctcagtgtctcactcagaaaacaaaatgagttcacacagttatataataactttttccacatgagatatgccacattgctttgatttgggagccaaggaatgccaattcccagttgaatagaggaaatggacactctcatgcttgactcaactctccttgcattagaaagccagtgtcaaacaagctggccacagacagaccagtcgtggaaacctgaacaggtccctgtgaaaaagattcaaggagaaacagaaaagtatagcattgctactaatgttctgtgaccgtgtgcatggtaagtaccatgaagcacagtagggacaggaaataaatgctggaaaggtcaaagcagtcagaattaccatgagttgttccaaatacagtggtctgggtgattcctaagccacatggagtgaaatattgtgtggattacaacattaagctaggactaacttgacccgcactattattagaagagtggaaaattgcacaactgagcatcttctttgtcttcagagcctgggggtgggggtggtcatgctgcgtagggattgcagttctgccttgatactgatcatttactaagaagattcagcttcctacaagatgaaaaagaagtcccaacccttcccagggaagttatactctaagttaagcaggcaaagatttcaacataatatagagaggatatggctgtagtaatgacagggaaattttaaacacaaatgccagaactcactgtccaagagagctgttctgcaaacccatggccttggggcatggtacaattagttcagagatatgtggattgctcaagcatttttggaagctgtcttcaaacactgaggagcagtgtggaagactgaaataaacataaaaatgacattatagctgcgtgaccataggcagctctctttatttgttcttcagagttggttgttttataagcatgtggggcgggggtggggttggggggcacactagtaatatgagtgtcaatgaggtaagacataaagtggcagcctgagaagtacttgtcaccaaagacaatcattatatgtcagtggtgtcatttaagctcacttttggtctacagagtaaaatcggtcttattaagttcatcatggaatttttggacaagcaacagaattacctgccaacaaggaaccacatcgtggtagtttaaatatttaaacaataacaacaaaaatcacagggtttctaacaagtgtgcaaattgcacatttcaaatcaaactatttgcagaacttctctgtctctctctgtctctctctgtctctttgtctctgtctctgtctctgtctctctctctctcacacacacacatacccagagagagagagagagagagagagagagagagagagagagagagaagatccttcccctctttccctagctctttccagaaatgcttggtattccttggcttacagatgcattgctctaggatgtgcatctaccattacccggcgttttcaggagacagctctatggctgtatttcttctctcttttgaaggacaccagtcattatgaagtatttggagtccatcttaatccaaaatcaaattctaagacaaagatgtatgttgggagacattaaaaaataattcaggtctgattttattaaaactagccaaaagaaaaagaaaaggagagggagaggggaggaagggagggagagagaaagagagaggtgggggttatgtgtttcaggcaacatcacttggcagctttgttggaaaatgtggctcagctaatattaagatgcatttaaattcaccatatctgatgctgtgtgtaaatctcatgacttctgaaactttagctaaatcactcttttgtcccaccatgaatggagggctcactcatgcttgccaactgacattcacctcaaggggactaaaagaactttgtcttaacaacaacaataatgaaaatagtctttctctaaatgtgatctgtctagaaaacagttgggctcaattatccctttccatttccatttgggcttttcagaaataccacaaatttctatagaagatagcatttacacttccattggcacaaacagaaaatgaagggtattctccagtctcaggtgaaaccatgccattaaagaagacagattttaggtggtgatgtctgccaggagaaccctgaaattactcgagagtttgaatgctcaaaaatggtggaaactttccctgtactcaacaaggtcaaaccagctcttaagaagaaaaatccagggtagggctgtagcttggtggcagactgcttgcctaggaagtgagtgggcccctaggttctatccccaacttcaggaaggaagggaagaaggaaggaaggaaggaaggaaggaaggaaggaaggaaggaaggaaggaggcagactaggttacagggacttatgggtaggtgtcgcagggctacataagtcaaagattgcaggaggagaaaccaagagtgaactaaacctgagtcccttgagaagagattaaagaattcttccacattgttgtgagagactatcctggtttgattatgtaatgtctcctgtcggctctcagttcaaatatttggtcattttttaggaggtttcagaaactttgggagctagggttatactggaggaagtagcttaccgggaggatccttgaaaatatattatctctgactattccctgctaaaaagtgggaagctcttctctgccacatgatgcgacttctgtcacaatgtcctatccaagggcacagacagctgaccatggaatgaaccctctaagatgatgagccagacctaacctactcttcttgtctatgtcacagaatttcaccacagccagagaaaggtaactactacagaagtacaatagaggggtaggagtctgagtcacttgagtctgagtctatggaaaaaaaaaaatctaatcctccaagaattgcttgtgtcatcctgagaaggacacaagaaccctctccaggttgagcctccatgacttcttcggcaactataccaaaacagaaggcaaagattcaagaggtgacccagggtagcggaggggttattagaattgtctcctaattcaccaaatcagcctccaagtcatggtcttcttttgccaatctctaaggaattcaaggagaatttttcaaaggccctgaccaaaaaaaaaaaaaaaaaaaaagtattctaaaagcagtaacagtagactatgggtcagaatcctgccaaacagaagtcctggcataaagaaaacttcctctcagaactgagtgtcatgcagagagtgaacttgtgaaattttgagccctatgatcttcagccatggcaaattctataagcttcatcaattatcttcttttataaagtgttcctttgactaatgctgactctgaactgaagagttgaagttggcttcccaagcaggccaggggaacaactgtctcagattgctagttgggagccaaaagaaatattttccccataaagttcccaaattgcttttctttggtgatcattgatacaagctttaagcttagaatagttacctaaagataacttactctaggaagcaaggagaacacttgaagactaaaacatttgcaggaggcttggcaagcaagccaaatactggtaagggttaagcaggaagcctgagctaatgaaatgaattagttaaagacaacagtttaacaaaagggaggtgtcttggctaaagagtacagtggctccccagatccagtttgttactgatgtccaagaaaatgaacttataactgcttactttttaacaacaaaaaaaaagaaatcaacattcccccaatattggatatggtattttttaatagccttattgagatttaattggcattcaataagttacacatatcttaaatgtgtacttagtagatttcataaataagaagtagccagcactataaacaaagtaatgagcacatctgtcattcccaaggctttcttcactttctccaatatcccatcttttccactcttaggctcactcatgttactatgcaagccaatagttcattccttccttatagctaaggattattcttttgtgtatatacactacagtttgtatacatagccatctggtattggacattagtattgtttctagcttgggactactacagctgttgttagaaaatttgacatcaatatctttggatatatgcttagtctatcttaaacaaatacctatgaatggagtggttgcatcatgcaatagctgtacatagaatcttttaggaaactgacaaagtgagccgttttgacttcccagtccagaatatgtgtattctgtttgttctacatgcttggtaacatttgggatgggcagtgttagacatgttagccatttgaatagccaagtagtggttcttcaattatgtttttaatgtacaatcccttgtgaccaattctgctgtatgtctctatgcacttgtgtaccatttgtatatcttcttgagtgtttacttacatcttctgctctttttattgagttgtttatttttattactgaagtttgtattgtgtgatttaatgtgtatgtatgcacatgactaagtacacacttgtacacatgtgtgtatgtatgttcctatagaggccaaaagtctatgttaagaaagtgtatccctctgtcactttctaccttattttttgtgaccaggtctctcattgaacccggagctcactggtttagctagaattcctgtccaacaaggccctgacatcctattgtctccttagtgatgggactacaggtgtgtgcttccgggcccagattttctatgtgtaatgaaaatctaaatccaaggccctgtgtttgcacagcaaacactttactgagctctctccccaaccagcattactgttttgacagtccttagcaaaatctacataaatatctttggccagatatatacccaccaatctaagacttgtcttttcattctttaagcaatatttacaaaaatgtgtttttcctggggcttgtgatcagtggtaggctgcttgcctagcacatgaaaggacctaggtttaaccccgagcacaaaagagacgctgcataaaatataaattatagagtatatatactgtgtatgggtgattttgctgaagaagaacttactttttttctcttgttagatcatgatttttgatgttattttagaaatatttgtgtatcacaggatcacaaagaggaaagttctcttaggatttcttccagctgatcccccaattttataataccagaaataattttaaatttaataaaaatgttttaaactaaacacgtgtatagggtccatgtaacttgtgaagcagtttacctgtaatatcttgcatgctccaaagtttttatcacaaaaggacaacaaagcccttagttaatgttttttgcatcctattttatcatagatacgcaaaagctttggctgtgttcttcagggtcatctttttcgtacacagaaaataaaaatcttctttaaaattgctggcttatctgaacacttatacaaagtattggaaaaaggataaataacagcttccttctcctgagttcagacattcaaaatcagatgagaatcatatccacagcctggcaagatgtcccaatgggttaaagtgtttgtcaccaagtcaatagcccagcactataactgaaattgttatccatggatggagctaaagggaagatggagttaattaagggaagaaactgatttgatggagttaggggaagggacatgagtggatgggatgaatgaggggaagggacagtagacaaccagactttcattttcaattttatacccagctgagtagtctgtgccaaattgggggggggggttattcttcagtgtcaagcaatatttttaaaaagatagtttcaaaagaacccactgattgaatgctcttctgttgatgccatttgaatacattggaagataaaattctgactctgggcaaatgttaacattcttgtttagtcaacaaatacagtgtattctgagtgcttctgacacaattctggaactccacaaatgacacctggaattggttgcctcatgttcaaatattgttcataggaataccttaaaaatgtaatccaaccccaattaagtttcaaagtactaccgggagtgcatgcacgatgtatccagagggtactactgagactaaagagcagcatgcagttcccaggcaaggaaggatttgacttcatcagaaacagtggggaaagcttggcagaccctcgcaatgttgacagtcagagacctagcaggctcagtgacatcctcaggctctgtactctgaaaacacactcacgtctcctctgctacagtagaggcggtttcagtgccagagcataaagtttgtcgactccatcacccgctgatgttgcaatgagaattccaaagctactatgacccccctgtaagtagaatcgccacagaagtgaagctttctacttgccttctaaaaagaatgctgcctcaaaacctccttagtcttctcttctagaacgcacgtggcattactaaagcagagtgacagctcatcttccaatgaaatccctgaaggataccataattcattttctgttttaaaggacgaatggggagagctacggggaacccacaagagctacctgctccaaacgttcttcatcaaagagagcaatgtaggtctgaatgcccccttgggacctcacactccagaggggtcctccgtgaagccgcacagagactcgcttacacatgggaactagggactttgtttcctgaagtgtgtggacagatgacagtttggctactaaataaataaataatcctgtcttacttagtagtaaaaatattgcctgccttagagaagatcagccactccatttgggtttactttagttagtccagggtgacttggtttggtaaggaaaacacaaaccttgggttttacacatgagggttcagtagaagacccatgccttgtcatctgtgtgtccttagcaaatcctctgtcttctctgggactcagtgtctacacctgtgggcagctcagtgggttgctgtgagagttcacatgtacttacaagagctacaattacccagggggctgaattcttatttgtctattcttacagtctatatattacatctgagtattcaatgctccattgtattgcttcataatttcctttctgactttcaaatactcagtcaggaagacaagcacatctcacttgtccatcctggcattttccacctgccattgcttaggacagaatgagcactgaacaaatgctttttgaatggaagaaagacgaaggaggggtggaatcagtttgatttctcaaatatagtaaaatcatggagggcacagatggggttaaaccagacttcaaatccaaatcctgttacgcactagctgggtgactttgggcaaatcattccattttaacaagtaggaagaagacaatacctgccacacggggttatgataggagttagaagatcctcccacacacacaaaaaaataaaaataaaaataaaaataaaaaaccctcagtacagtgcttggcctatgataaacactttgccctttcactgccattgtattgaaactcacctgaatctacttaacgctttgcaaatatctggatactaattgtcttggtccttaccagataaaaaaaagcaagaaaatcccaggaattatcttttactctcacaggaaaccattggaaagaagcagcctatctcctgcacagcaaagagtgttctgagtgtagcttgtcactgacaagagtgagatagcttcagggttttatataagcctctgaataacatttgtctctgtgttcaaggaacaggaatctgggttctgaggcttttagcaataaccacaacctgatctccaggagccagcaacccatcatccactgatgtttttgtttttatttttttttaatttgtttgtttgctttcttgtgtatttgcttaaaagcagaacactggatgctggcttagtagataaagcattccccatgcaagcaagggcaaaggatccccagcaaccaaacaaaagccttgtgggagggactaccagaccacctgcaattccgatttttacaaggcagaaaggacctcatggaaagaggctaactagactagccagactggtaagctctgggtccaaatgagagacctcatttcagaaaataaagtccagagtgactgaagaagatacctaacatcaacatctggcttcaacacccatgcacacacatgccaacatgtatgcacacattacatatgcaaaaaatgacttttttaaaaacaagacagaacacatataattagttgttcaggccaaaccccacagtctaagaagagacttgctgattagggaaactaggttctgggttccagttgctgtctttctgtatactgactggatgagaattcactctctcataggccaacttactgagcacttccaaaagagagctaaacatatttcctagtaagtgctcaataaaaggtggtcattactatcgtggctgctattgttgtccagctaagattatattatctaaaaaatggttatattacaggtcttaaaatttgaagccactagggtatgaaaactagtatataatttatctgtactttcctatagtacatgtaatattaattataattaccttagtggtataatttaataactaacatggcaattgcttcatggaccatctggcatttcaactaaatcttaaagaacgggtagcatgggactgaagagatggctcggtggttgagagcacttgttgatcttgcagaggacccaaattcagtacccagcactcgaatagtggttcacaaccatctataaccccagttccaggagattcaatgcccttttcagaccttggaaggtgccaggagcacacatggctactctacatacatgcaagcaaaatactcacaaaataaataaatctttaaaaaagaatggacagcattgaggcaatgtaggttataaataactaaggagtaaaagcaggcatttttagttgatgcctctccaggtttctagttagttctaagtcttggttccaatagataaagctgacagaagccctggaagctgagggttaaatggaaataaggccccaaaccaaacacttctcagggatggacacaatggaatgtagttcattatgagttcccctctttgctgctttcccatatttgcttgacttacccaacctgaaatccctcaggagccggtcagaacactcaccatgctaacaatacttgcctcacaattatcgtgttattagtatttatgttgaaaacaagctccccttcgggattgctggctcaactctatcggcacctgctggattctttaatatttcagttcctccctcttcaaagacccacatcagagcctttcctgaggcagaagaccaaatgtacttgcacctgggaatttcccttgtggcccaaagacccaaagggggaaaagcaagaacgactcttgcataacagaagtttgaaaggaagaagataaggtagggagggaagtgggtgtggggtgggttcttgaggtctgaaaaccacacataaagatttaaattggcctttttcatagccttccctcatcccattagaagctcataaaactccccccaccccgtgtgtgtgtgtgtgtgtgtgtgtgtgtgtgtgtgtgtgtgtgtgtgtgtgtgtaagaaggcagtaagtcagaacttctatttgtattgatgcctcagaaactgtttcatgaaatgtatttgtaaaataaacctaggacaattgtgctcagacttcagtgagctcaagaggcacgagggagccactgaagattctagtttccacctgaaagctctgtggggtaggtccaggacagagctctgggacccttactttaacaatggtgctctgggcccctgcaaagtattccagtcaaagctttagactctgatattcattaatttttcccgtccttctattcatttgagataacttttaactcttctcaccaattttctcactatgcatgagattcccatcatttatgcaggtggatctttttcattttttccccttttgggagacagtctgtgagtggtgatgggcttttctttaataggactggggcaggtgtatgtgaaataactttacggtgtctttccactagagagcttgcatcttgaggttttcctcatttcgagccagttaaactgaggaggctgtggagctggattgtcctgtgacctatctgttaaatcaaatgctctgcacaaaacagacgtgcacagaaacacagctttatgtgtctcagaccccagggctcttgtgtatagccatatgcaggtatgaagtgaagcaaaggacccacaggtacccagtgatgggccagatcatgtagagtttgtcctgacttggtcttgctttcttgggctatatgccctttctcagctactggtggaacaatccagacacctgttctgaaggaacgaaagttgatcacaagaatcaccctgtcctctgtggcctttccacatttgtcactgaataaatttggtctgcgattgaggcaacaggaagacaaagggaagattctgggcccttggacctagctgagtcctctggaaatgaactctgcatggagagcagattcagaaagaaaatagcggggagaatggagacaaggactgtggacttagcggaggtatcgtcatacacatttgaagaccagtaaagaggccccagaaacaaccaaaacagcacactcttggttgtctatcataactatatagtaagactgtattgctgatgactccacattctttagttgcaagacatagaaaaattagccttaaatggaccaggaatcactccctggtgtatatctgtcatagtgctagaagttgctatgcaagatgctgtggaaagaaaaaaaagcattggtgttatccagcactggaccatatgtgctaagatactgacctgcaagcaagatatggtcctcttataaaaggtttataagaggtaaccaacccctctcttgattggatttgaggcctgctccagaggagatttatccttgtactataagcatggttaaaacctacagctagggaagtcatttgtgtttctctaaatggtcataaatgtcaaactcccctttaaataggtttatatctatactgtgctgactccgaccctggtcagagaagccttttatttatagtagatagtgattaatacagagacaaggctgttcaaagtgctaagaataaataaggatgagtgttcatctatagatggatggctgtatcaagcccctgcctcaccaaggctcaaggaacatcaatcacagaagaagggacagaagaaacataagatccagaggagggggagcaatcctgtgaaattctgtcctctagacactacagatgttggacataggagctcacagcaactaagattgctcacacaagatctgtgtaacatcaagccagttcaattttctagcatgaattgtggaagagttcctgaggccccacttttagctaaggaacagtggacagcttctgggaaatgtactttcttgaggaagggggccgctgtttgtgtttcctggacccatgtgaatacaggcagcactcttggtctctgcattaaaataaatatacaaataaacaaatagaaaagtaggacatgaagttgagacacagacgtgatatggactcctggggggagttggggagagctagtaagaagtgaacatgatcaagctatattgtacatatgtataaaaatttcaaagaataaataaaagcacacacatttttaaaatgtgaagaccgggagtaaggagatgcatcagttgataaagttgccatgtaagcaccaggatgtgagtttatcccctgcaccatgtaaaaactgggtgcagcctgtaatcccaatattgggcagctggagacaggagtatccctactgtacactgaacaggaagtctagttgaaggtgagctccaggttcagtgagagaccctgtctcaaagagtaatatggagagcagttgaggaaagcacccagcattgtgttccatagcaaccagacccagagctaacaatcttgtttactcacaatgtaagtcaagaagtttggaaggatttagctgggtgatttatctccatgtcttttaagtatcaactcagcagttgggtctagaggatctacttctgagactgggggataggtccttcccctacccatttgatggattctctctcttctctcttctctctctctctctctctctctctctctctctctctctctctctctctctctctctctctcacacacacacacacacacacacacacacacacacacacacacacaatcagaatcagaatcaggcttctaacatggaagttaagtcagggtccagtagagtcaagacagagagaagctgctcatccttatcctctcagagctggtgtagcatcctttgtactgtgtattattttggtcagactatcacaagccaaccccaattcaaaagaactagaaacccactgctttagagtaggaatgtcaggatcccacagccatctttaatctgacacagctacccttcatggagaagatggatttttttcccaaccccttaaatttatcaataccagtgacttctttaaaactgaggttttgtttgtttgtttgtttgttccctcctggaactctaaagattgagccaccttatgtcaacaacacttgggacatctaacatgtgtttcatggcctgttctcttcttactcaggccagaagtggattcctatatctagtgaggtataatgtaaatagaactgattttaaatagaaagtaacagcaggaaaacaacaacaacaataacaaaaggactcttttttgttttattattagttcaaatcaggaacaagcttgctccacaagtcaatcccttctccctctccctcccctccccccacccttcaccagcctcccgaccccattccccctctactctccagggagtgtagagccctccatgggggctccccaaagtccaccacctcatcctgggccgggcctaggccctcccccatgtgtccaggccaagagtgcatcccttcatgtgggatgggctctcaaagtcccttcttacaccagggaaaaatactgatccactaccatgggccccatagagtgttgaggcctcctcattgacatccatgttcaggggtctagctgtgctggcctcccagacagtagtctggggaccatgtgctcccccttgttcaggccagctgtttctgtgggtttcaccagcctggtactgacccttttgatcttcattcttccctctctgcaactgggttccaaagttcagttcagggtatagctgtgggtgtctgcctctgcttctatcagccactggatgagggctctaggatggcatataaagtagtcatcagtctcattataggggaaggacatttagggtagcctctccaccattgcctagattatcagttggtgcaaaaggactcattttaatgtaattgatttttatctcttaatgcccagtcctccctgtttcagaagtcagttgtactgggaaggtcagtaactcactctacaaagcattgttccatcagcctcttcagggggccgagagataagttcattgttcagtactctgcttatggtatccagcatgacccagatgccacccttgtagtccacacacaaacatgtctttgttgccccaagtgtagcaaattctttaccatgaataatttactacaacaaatgctctctttagttctttctctgttgttgagagtatttcagctccccagagaaaataaatcggtactcagtaggaattaaatgctggaaaggctcttcaaacactgcggcaggcaagaaatggaatggcacaatttgtcctacaaggaccacgaacggaataagtgaataggtttgagacaccgacacaaagcatcccattgtaagaaggcagtgtggcagaggcatgagggatctggaggacaggagttgtcctgcctgggtttgtataccagggtcatcacttggacctataaaactattgtcataggtgaggaacaggctgtgcctggaaacatttgccctatgggactggtgcctgaagggttaaatgccctgaccctagcatagttctcagcatgtggtaagcatctaattccagctagctgccattcttactactattgttaccacacagggactcacattactctttgaatgtgcaaagaaaatagtcttttctctgtctattattggtgttctagggaatctattaccacactgggagcaaggaagggaagaattttagataggctagtttatggttccacagtgatgccttctggtcttgaatgtcttttccgtgtcattccatcttgtttgggtcatctgtattcccccatttttcaccaaaagtgaagtgaggtataaataagaagtaaaaggcactttgtgccttcctcagcatcctgattaactctagagtgggttatgtgttgtctctgacctgacattgactttaccaacatttgtgactcctgacatctgtttctagacccgtcagtgccatggcctctgctctccagcgattctcagcacctcttctctccatcatcagggcatattgggattttgtgattttctatttgccaagtgaaagatcctaaggagctaggagccctcccctcagtcaccacccttcactgtctttccagcactgggccaaatgctagtgatctccccagaccctggttcctatgtgaaggaaaggagcacagctttgcttctaggagatatttaactatggtggcattttcattgtcacagtggagatatccagagatgatacatcccacagctcacaggatagctgacaaccaccaaggaatagagtatattataatagcactgggcttgagaagcatctggtgttgtgagccaacagatcctcagcccaccgtgggggagacaaaccacctaacagactcaagattcttcatcttccctaagccttctaagtgttatctagcatggaggaatccctccctctgccacgagcagcggttctactctgtgtctagagaaaggggcagataaggacagagcccctgtgcctctctgcccccctcttcactgggacacaaacactggacctccctaaccttttctttatgtcagagtttccccagacatcattttttttcctcctacttgcagaggtgtcatttggccccatggcaggaacagcgggtgactatcaagagagaggttggtatcactaggaggtaagctgagaaatgtttcagaaatgccttttatgcttttattaatattaaaaattattatataaccagccattttccttatgtcgggcatggggcatgataaaatatgcatcaaaaggaactacttacactataaagaatttattgctgcctcaaacataaaaagagcaagccatgtgttgtttgggttctttttgtccaggtggccctccctcgtgtcatggggcagcaatctgcagaagctgtattcctgggctaatgtcttgcccctcccccagtgtaagactaggcctgctttctcagcttgaggccatccataggtgagaggttgtatggatgctccaggcctaaaagctgcctgcaattagtgagaagattctagagctgaggacacaggaggacacaggcttggagaaacatcaccaaattctgctggaagtagcacaccccggtttcttacttcacctttctgagcttcagtttcctgacctgtaaaatggacttggtgatcacatcaatcagttatttgggttgccctaacacaatgttagacttgatgccttctcatcactctggagcctaggagcccatgatcaaggcaccagcaggatggctttatggtggtggttccttccttggctttaaaatgaccagccccttgctatacatttaactgtgtaaactcaagaagaaaaagagaaaagacaggaagagagagagagagaaagagagagagagagagcatgtgctccctagaaggccatcgatcacatggaattaggaccagaccacacacttaagaattcatttaacatccttaattatctcctaaagtccttatctctaaatacaatcacgttgagggttaagaccttgtcatgaattgcaaatgagatcacccatatgaagtattggaaccaagaaagtgttctgtgattgactgtgagtgttctaattattgtggttgctgctgctttaggagtacaaagcatcgtctatccaagatgaacagctgactaattgacacctgccatgtgaaaggcgtttgctgaatagaaactatgggagaaagacacaatatcagacccagacaaccagaccccaggaagtaccaaagaaaggtgccatattaggctgtaagtaagagatgaccattagaaaggaaaccaggtcatctgtgatgaaggaaacagcattcactgatccagagatagacaaagcagttacttaagacatagtgtgtgaagaacagtcttttcaaattttattttaatttttcaattaaaaactaattagataatttccccttccccctctcccatgtaacccccacattgctctctctctctctctctctctctctctctctctctctctctctctctctcaaattcatggcctctatttccttagttgctgatacaatatgtgtacacatgtatattcctaaatatactagctgttcagtctatataattttacttgtatataaattattccagggctgaccacttggtattgaatcatcagttaagagccttttctctggggaaaagcagtcctgaattgactatagttctttgtctggggttgagaccccatgatatttctcccttctgcgttagcatgtatattgatatcatccttgtttgggtctttgtagggaaagaccttggatacctgtaccgctgaccatgcccatgggcacagtcacaggaacgtagaggggcaggataaagagagagaacaggaggcactcctcctctctcagggttcaggccaggtcttggaggcatctgggttcttggcagctcagagtgcctatgtgagtataccttcttaataaactaccagttaataacctatcccgtgttcaatcttgttccttatcaggtcttgttcaggtagtcatgttcatgagacttcatgagtgtagcttctctggcatttctagaagacacactcttacagaaaacttgctgtttttctagctacagactttccacatgttcttcctctgtggtccctgagccttagggacaagagttgtattatgtatgtatcagtaggggatgagcaccacgtggtcactttgtctctgcagttggattgtttgtagttttctgtaatggtctctacctgttgcaaataagaaaaaaaaatgatgaggggtaagtgagaaacctggcattagggaatatgaatatgtgtgagtataggacaaatatttagaatgtagttaggaattatccaggtttaataacgtatcagttgtaggttcttttccaagacccgcaacttcagtagccatgggtagttggctatatttatagtaccaggcatgacttttctcttgctagactggtcttaaattctatttaaggtatgcatgccattacagtacccttagggatgtgatgtcatgcttgccattgatgtggtttgtaggcattacagctcagtaggactcttggttgattccatcccttggaagcttgtatagcacctttttgtaccatgaaagctagttctcagagaggaaggcttacgggcagatccagcttgaatcctctgggtcctgtgtctgaagtagatcctgccttcagcaagagggctttgccttcagtttctgagagactgctgagggcaacagccataacctataatgtctggggagtcttttggacaatactgaccaacaattcaatagaagtatctcatgcctagtagtggggtttttgttagaaagtctctggctcttgggggaaacactggcagccaaattgggaaattttcgtatgtatatataatgtaatttaaaatacaatttcttatgacttttttggacattctcactgttattttaccctccatcttctatatttacctccctccccttacctagataaccacaacccccatttttcccattccttcttcaaattgtttgtaccctactattcccctctctaatgctccttccccaaccatgatctctttttactgtccttgtttctgcaggttaccttaggttatataccctaatctaaagatttggaactagatacctcaaataagagagaacatgtgacatttgtccttttgagtttgggttacctcaatatggtcttttctagttccatccgtttacttacaaattttatgttttcatttttttgcatttgatataagtatttgcttttattaattttatttaaacttaaaacaatcttattttacataccaatcccagttctctctccctcctgtcctctctgccaccatctccccatcccacacccatccattcctcagggagggtgaggtctccttatgggcgatcatcaaagtctgtcacatcatttggggcagactgaggccctcccccatgtatctaggctcagagagtatccctccataggtaatgggctcccaaagcccattcatgcacaggggctaaatactggctccattttgccagcagtcccatagactggccagggcccccaactgacacccatgttcaggggccgtggttcaatcttatgcaggtttcctagctctcagactgaggtctgtgagcccccatttgctcaggtcagctgtttctgtgggtttccccagcatggtcttgaaccctttgtttattactcttccctctctacaactggattccaggagttctactccatgttttgctgtgaatctctgcttctgcttccataaaatactgcatgaagaaggctctgtaatggcatttaaggtagtcatcaatctcattatagtggaagggcatttgctctactattgcttagattcttagttggggtcatccttgtggattcctggaaatttccctagtgtcaggtttctcactaagcccataagggctctccctattaagatatctcttttcttgctctccttctctgttctttcccccaactcaaccttcctgatcactcatgttctcctcctccctctcccaccctcctcctctttctcctgcctccctctccaccctacccctgctcccaatttattcaggagatcttgtgctgttccccttctcggagagttcatgtatgtctctcttggggtccttcttgtttcttagcttctctggggttatgacaaaaccagatttaaacaatactgcactacagaaagtactggaaggaaaactccaacccaagaaggttagctatactcacaaaaacataggcaatagataataccaaaagccaaaaaaagtagaaacacacacacaatgccaacaacaacaacaaatccaaaattaacaggaatcaataatcaatggtcattaatatctcttaatatcaatggtcttaatttgcctataaaaagacacaggctaaaataatggataggaagacagaatccatccttctgctgcatacaagaaacacacctcaatttcaaagacagacattacctcagagtaaagggttgggaaaagattttccaatcaaatggacctaagaaacaagctgatgtagcaatcctaatatctaacaaattacacttcaaactaaaaataatcaaaagagatgaaggtcatttcatatttgtcacaggaaaaatccatcaagataaagtctcaattctgaatatctatgccccaaatacaaaggcacccacattcataaaagaaacattactaaaatttaaatcacacataaaaccccacacacttatagtgggagacttcaacatctcactctcaccactggacaggaccatcagacagaaactttaaaaaaaaaaagggaactaacagaagttacaactcaattgggtttaacagacatctatagaacattccatccaaacacaaaagaatataatacctttttctcagcaccacatgaaaccttctctaaaatcaaccacatactctacaacaaagcaaacctcaatggttttcatttttctttacaatggaatagtattccagtgagtatatgtgccacattttctttatccattcatctgttgaaggccacttaggttgttccactctcctagctatagtgagtagagtggcaatgaacacaaactggacattgtctgtggtgtactctctaataacactctccttactacctcaatacatgaagtaacaaagattctgagaaattattaggcctgaccaaggctgcacaatgattgacagaagcttgacttaatttcaagttgtatctcaactttaattccacatacagctttgatgctgcaaacataatgattggaatgtgtgtccattccccagagttatctttaactagaaagaagagctggcctccatagcaacaggctttatgggggggggtgatgtccagaaccagctctcacagtattcttaagaatacagtattctactgtattccctgtaaacacagtaggctgacaattactgcacaaattagttagataacaagaataaggacattgaaccagttagttattactacataacaagtaattggctctaaaatttggtgagttgaaatagccacctgttcttcctcacaactctacaagttaggtcatcatagatggcccaattgagtgtctctgtctacaggtatatatctgggtactctaagctccatatggagtcatccagatctctgtcgaagggaatcaactacctggggaataagaccagagtacaaaactggcatgtagccactgatgcccacactctgttggccaaaccaagtcacaaggccactggaaacgaattctgctgttttgaggactctagtggcacaaggcaaaggatgtggatgaaggaaccactgaagaactgaagcccatatttctgtctaccaaagacattttctcagggaaggctggttacacaaagcatgtggagtgggatgagaagatctataaaatcccactagctgtcaaaagatttgctccagaggacttcgtctaggaataaaacaccacatttcctcatttctcctactgagatcatgaaagatgggccctcccaccctcccacttccctcttccttttccttaaaaagtttacaaaattgtaggatgccaaaatattaggcaagcctggctataaagagatccctgagtctcaaaagttcaactagctacaaaagcagcatttggcaagtccctgtaaaagctgtgtccctctgcctttgggtctcatagtccgtcccctttagtgtttgatctacacatctgacttataaacacagacaccagccttgctgcttgaccaataggaatgaatgtcctaagcaagcagaaattaaagtgtcgagaaacatatatcagaaagcattggggccgtactttattgcagaaagccaggagaggcctccagaggcatggaatgcctggatatagctctatttagttttccttgtgttggttcaaccattgcaatgaaggtgttgtttttatttgagaagtataaatttatttgttttaattttattttattaaactgggttatataaggccattttcattcaagtacatcattacttagggcattaccccttttttcactacccatccccctcttctctgttagtccctcttgttcccctaaagagtttcacttctacatttgtgtcatatatataggaccacaaatgacagaaaacatagtgttcgactttctgagactgacttaattcgcttaaaatacgattctttccagtgtatctatttttctgcaaatgacataatttcattcatatttaggactaaaaaaaacttcacacacacacacacacacacacacacacacacacacacacacaatttctttatccgttcctctgctgacaggcaacgagattaattctataactttactattgttacctgtgctccacaaacactgatatgcaagtttctctttgatatgttgacttatagtcttttgggtaaatcaccataagtggcttagataggacttatggcagatttgagttgagtttttgtttgtttatttgttgttttgttctttgcttgtttttggtggggaaccactaactgattttaatagtgacaggactggtttacattcacaccagcagtatatactgactcctgtcgttcttatttatttatttatttatttatttatttatttatttatttgaagacttgtttatttattttatatattagtgttctatatgtatgtatgccaccttcatggcagaagagggcaccagatcccattacagatggttgtgagccaccatgtggttgctgggaattgaacttaggacctctggaaaagcagccagtgcacttaaccgctgagccatctctccagccccaactgttgtcattctacatcctcatcagcattgttttcttaatggctgccactctgattaggatgagatggaatctcaatgtagttttaatttgcatttctctgatagctaccgatttgagcattgttttatacatttattggctattcctatttcctcttttgaaaactccctctcatttattgttgagttgtttgagctcttgtttagtctttttagatctttctttgtatattctaaatactaattctccattagatggatagctaccaaagtttttcttccatcctatagaccatctatctcttcactcacataattgctgccttgctgggcagaagcgtttcaattttatgaagccccacatgtcaattgttgaccttgtttcctctccactggggtcctattccgaaagtccttgcctatgctgcttcttaggtgctcttgcctgtttttctctatgagagtgccaggccttgggttaaggccactgatccacttggagttgatttgcatatggagtaagaaacagagacctaattttattcctctaccaggagatagccaggtttaccagtagccattattgaagagattatctttcctggtgcatattttggcatctttttcaaaaagtaagctatgtgggtatatatctagatcctctcttctattacatcaatataatatctggtttcatgccagtttaatgctgggttttttttttcataactgtagtaacttgaaattaagtattgtaatgtctaagcattattccttttgcacagaattattctggctagaatcttttgtgctttcttataaattgtaagactttttttctacttctatgaagcatcttgatggacacctatttgactttgcagaccacttttggtaatacagccattttcacaattcttaattcttccaactcatgagcatgggggtctttttattttctaatgtagtatttaaaattttcactgtagaggtttttcacttccttggataggttgattccaaggttttgttttactttgttacataatcatgattactgtttccctgatttctccctcaacatgtttgttactgcttagaaggctataggtttttcataggtcaactttgtatcctgccactttgctaaagtgtctatgagattggaggtctcaggacatctcacatatagaaacacactgtctgcaaatagagatgctttgatttctttcttcctatttttatcccttttatctccttctttgtcctatgtttttaaatcgaggacatacagttccaacgggaaagtgaattgtttgttctcagtggcaatccccttggtatcgtttcagttctgccttattcagacagctccataatgtcaatttctgcagttcctgagaagcaaagaaataaattctttccaggggtctacatagcatatgggcactctcctattcccaattccttaagcaataggaaatctttcatgtaccacggtgcacagcccagtatccagatgccttcccagcctgtatcacaaaccctttcaatcaacaagtgtgttgcacattgctgacacatgatggaaggtagaaaagaaagggaagaaaattcattctctccacagaaagtgttggccagtcaccaatggcttcagagttcttatggttttagttgcactgcaactgggttgttaggggttaagagttttgggctctgcttgtaaaaacacagacctaaatcagataactaattttgaaacaattgcaatgcacttcactctattcttttgccaaagagcaccttatcatagcttgctttcctctttagtctttcttttaagtctcaataatatcttctcctgagcggggaaagaaagtaaccatgcactttgcacactacaaatgctagagacctctagatcagtgcttctaaaccaggagtgacctggctgtctgtgtttcaagtgcactacatgcactgggtacccacactgcacaaaagagagtctgggtttcatatccagcaggccctccagacttattcaagtctgcctgatcaacctcccattttccccccgatgaacatatggactgtgttagtgtttaggttaaaaaagaaagaaagaaagcaaagctaacgtccagtactttttattacagcaaggcctggttccttttttgtacgagttagtacagtatctgtggttatatgaaaataaacatccttaacataattaagcccgcctgccaaatacagtgttcacaggctctgcagtgagtgccttgcagagtggcccagacatagccatgttcagtcctcccctgcacaactgaagaccccctctccaatcgtctgtagctgctcctttatgtcacgtgtctcatggtctgtttccaatggcactgggagtgaagtccactaaatacacctacttttcaggaagtatgtcctgcttccttcctttactgtgagttccaaatgacagacagatatcctctaagttaataaaagagacttaaactactggagtcactgagaaatgctagagacctctagatcagtgcttctaaaccaggagtgacctggctgtctgtgtttcaagtatttggagacagttgagttatggaagttccagagtgggttgaacaatgaggaaaagtgctgttgtatctggtggctagacagtgaccactgctacacatggctccatacacaggctagccccacaacaaagagctcaccagccatgaagagactgagaaatcctgctagagatgctgctgcatttcacagggaactcaggcattttctgagcgtctccatgtgtcctaaagatacaataagctctgaggatgaaggatcttgaattccattctcagacatatttggtaagctcaaggaaagaaaataacctatgttcataaagcaaatacccaagaggagactaattatgaccaacacaaaccaaatagcattagtataatgcagcaccttcaattttgatacttaagaaacttcaccatattggatcaatgtgttgaagactttttatcaaaaataattttagtatagacttatgatttattaacaggtgactgagaagtatgattaattcagcacaattcccgctcttaaatatattagactctatgggaggagataatgtccacccccagggccatgcatgaaaagagatggactcaaagtgaagcacctgagacaactacacagaacaagaatctgaatgccctgatggagaggaagtagataaaacgggaagaatgattggaagtgggacacgcaaatgtatttttcaatttactctttaaaaattagagcggtgagctcccctgggttatgtgaacaagattgtgtgagtaaagagtaaaggaaaaatgtatgtggtgatagtctaagaataaagaccagggaagatgtcattgatataaggggaagagaaagttaagatttggattacatgggtgatgtgtatgagatgttgtcttgttttgactctctgcagatggaattaagtagctaggtaagtcctcagtcccaggagtccctaatccctaatctactccctacaaatctaaatagctcttccatggactcagtgaaggatggatgcacatacttgcccaggaggtctagctttgtttgcccttccctgttccctcagtttccacgttgcagtgcaggctcacctctttatcagaactgtcaagtgacaagttgagtgaccaggaatagaatgagattatttgttattcatactgagtgtggggagaagatttcaactttaacaaagacattcccaacctacccctaggcaccatggagccatgctttcagatatcattaagtccagaggtaagccatctctccacctttacagaaccggtaccatgtcaccaggacaggaagagcaaggaactctagctgcccatacttaggctgaaacatctgtgctaactccatgtcagtcaagactgttggggatgctgatctagcaagatacctctgtctacatttcatctttaaaattagcaagtaattgctgaaataaaagtataagtacaaaaggcaattttcacataaatatggaaggtctaaacaatagaaaaggtaatggatatttccttgaataaagacatcttaggaattaagtcagaaaaaaaaaagaaaaactttgttgaaagatgggcaggctatgcacaagattctggtacatgaagccacactcctcagactgtgagactcactcaagtcccctgaggtgatgtgaggtgtactaaaacaaactctacagtcagatgaacttggggaaactgaaatcaatactcaatgccatcaaatctcaaagtatgcctgcagagcctcaccttaaatattctaactgacttttgcccactcgagtttcctaagcaaaacagttttatttgaggacacttcatttactgcttttcaataaactctctacaaatgtttcattaggacccaggtattccgtctatgtgcactgcgtgcggaggcactcagccgtgtggatgtgtagagagtgcagaggttcacgcagggtttctttctgtatggctcttcaacctcctttgagacacagggtctgtcattgaatctggaacttggagttccatctcgactggctggccagtgagcctctgggatctgccccacagtgctggttacagacgccccaccacactggcttttagggcaccactgttctttgttttttaatggagaacattttacccactgagtcacctctcaagccgtagttggtacttagatattttatacacactttctgtgggccaggtgctgtccgcaatactttagaaacatcaattcacttgattctcataacgtacctgtgaagtaaatattattgtgtgtatgtgttttttgaaacagggtcttgctacgcagctcaagctgttatacaactcacagccctgaggtctgtttcatataaagcagtggttctcaacctgtgcgttaccaaccctttgacaaacctctgtatcaaatttatttacactataattcagaacagtagcaaaattgcagttacaaggtcaccatgaaaataattttatggttggggaagagctgtattaaaaagggttgcagcatcaggaaggttgagagtcactgatatagagtatggtgtagaaacagtccccagctgggcggtagtggcgcacgcctttaatcccagcactcaggaggcagaggcaggcggatctctgtgagttctaggccagcctggtttacaagagcaagttccaggacagcctccaaagccacagagaaaccctgtctcgataaacaaaaaacaaaacacaaaacaaaaacagtccccagaaacagagagcagaattgtggctattaggcttcaatgtggatcttttaacaatggggaaacgattggtttaaggatataaaactgcagttggacaagaggcatggactctgtgaagtcttgaggtctactgagagcatgataaatatggttgataacaatatgctatattttaaaagttgtgagatagtatactttaagtgttctcaaaacaaaaatgatgaatatgtgtgatataacatgttaattggtttaatttagccatgccattgtgaacatactatattctgtgtcataattgtacatgagtttatttatgaactaaataaattaaaggaaaaaaaacaacagtccccagatagctgtctggggaaggaacctggaacctggtagggatcaggctttgtttggaaaatcccttcatcattttgtgatattctaggcaccccattgacatgtatctctatgctgtgactccaatgaagtctttttgttagaatgatctggaggcaaaggtaaggagaagagtgtactggcctgagagtgccaccgcagacactgccaaaagacagcatgtactcagaggtatattacagatgcagtcaagacctgtagcccgaagggggatgagagagtacagcccatgtctctcactttaaacacaagtgagaaaattgggcttgagaggaaaagtcttccaagagctcacagaggtaactggttcctctttctcttcctaatgtagatgtctccctactcctgactctatgattgctcatcctgaagaatgaacaagtcacactgtgctaccctgaaagtggaaccaaccaaaggtcactccctattgacagtagtgaccttgagagctgttgaagtccacaagcaccacccagaagtcttccagcttgactccccaacccctgtatttcgttcccttaagtgggatgaatactttttaaatatgtattgagacacacacacacacacacacacacacacacacacacagagagagagagagagagagagagagagagagagagagaatgtatggggtgctggggtgctttgggaggtcagaagaggtcatcccatcctccagagatggaattataggtgtttgtgagcaaactaatgtagatgctgagaaccaaactccagtcctctgaaagagtagcaagtgctttaaacatcggccatatcttcagctctccaaccacttccttaaagagcaaagtgcatctcatcccagtgaattctctgggttaattttcattatttaaacaagctttagtccatatatgaatccaatatcatgcattaggtgataaatatatccaatttttattcctcaagtgagtaattaaaataaaataattaaaattaaatgaaggtatttagcagaaaagaagagcctggaaacaagtgcaaactctgagtctaatttctccaaaaacgttcctgcttgccatggcaggtatatgtgctatctagagctcttctgaagaagggagctgctaaattgctgggaggtagagatgagcacccttgaaggttagtgtgggagggaagactaaggagccaccccacagctgcagaatctgccaaagtccctggaaaagtagcataaatcccgctcccacacatgtcactgtcgctgagccaggcgcgctaggtctaagaacaggaacccttagagagagctcctgacatagtcctaggtgtcttcctcgaagccctggatcaggcaggcagggaggaacaggtctgccactgggccctgagagctttcctctggcctggtccagacaagccctggacctgataactaccagacacctgtttactgcggagtatgtacagctgcgcacaacacagcagacacagctggtttatttctcccccaaaggaaactcagctaagagatgagctttctagaccatgaaccctgatctaaggagatggaaaataagcaaatacagacatgcatgagcaaacgggacagaggggaactcaggaaggatcattacccccaagcagttaaggaagcagtgaagtgcttagagcatataagggaaacaaaagatgctcataacacacagagagtaaaaagcgtcgtgtggcgggaggatgagaaatattccagtacgctaaaaaaattccaccttgttatgtgtaggctcaaatagcattttttgaggaaccctaaggggaaaacaaagttcatcaacatccaagtcccgcctcttccattaggaaatcctccctaacttctctaattcatagggaccgcccctttctgtgtcatgttcttgaatggctttgcctgtgtttatttgcctgtctacctgctttggggttggcggcagagtgcgtgggttccagcacgcaggtgtagaagcagaggaaaactttcaggaattctctccttccatcgtacaggttccaagtatcaaagttaggtcctcaggctcagccacaaatgcctttacacgctgagccattttgctggctctgtctatgtttatctggtgttccatatgcaatttgagtcgggccaaggtgtatgcaagaggaccatagccaaaagtccaggtgtggctccgagtctcaggtggacttccaacagcaaaacagaaagagaatcaaaagtccaggtatgagacactggaagaatgaagtgggtccttagtcagctcgaacagagggtaacagcatgaagaagcaagcaccatgtgagcctgataggggtatatgatgaagatgaggcagacttggaggatcacaaatcagagaagctgaagaaagaaaaccacagcaggagccccaaacacagcaccagtgtcagggcagggatgtttgcctttcaggccttatttgtttatgcttgctgtggaacttttcctaggaaaatgtgaaaacacatctattcagcccagataggggagtcaattactgaccaaagacatggtttcatttaagtctagcttagtgaactggtaagttcattgtggctactatgggagtatggtttgggggtgcttacgaaaacatgtatgacccaaaggcaggtgaatcacctgaaagcccacaccagcatggatgaccacccaaggccttatccttagagctccctgcaggactgaagttgaatcttggatgcttcaataacttctcgagcctcataaattatacttgcttttatttcttgatatgtgtgcacatttgtatgtgtttctgtaggtaacgtttacttcctgagtcttacaagcccatctcctccctctaaagagagtgtttcaattcaaagaaaatacagtaattctacaacaatagctgaacttcccattgccattgagtagtccctggcccccaaaagaaaaacagatttggctatggtgttttgaaaaggagtactgtgggatacagtcagcacttatgctttcctaccacccttgactgctgaggaattcaaagaatgaacaaaagaatattctgaccttcgatgtcctttgaggtgcaacagacggcagtgccaacacggggggccaagatagaagcagcccctggcttcagcaagctcgccacccagcctgaagaagtttcttctctctgtctttccattcctcttcatctcctccttccttcttcctatcaatttttcttgttttaaaggagtaactatcatgggttcaggtaaaagcccatcatctatttcctatatagcaaaactctgctatatctcattagagacccctactaaattgctcttctatattgttcaacataaaatatgtaggatgaaagaacaagctattggctcttcaaaaattacaaaggagaaatctccatagttgtaagatgacttactaatgaaaacagtattcaagtgttagtctcccttaatctctataatatgaattaatatatatactatatatatatatatattcataaatacacacaccatcaatgggtcttttgatagctacagaatatatactaataccagcaaagcttaagatgctagaactttatactcctgtgatggttattctttgtcaactcaacacaaagtcaagtcatctgagaagaaagaacctcaactgagaaaatgctcccaacagactggcctgtaaacaaacctggggggcattttgttgattgatagttgatgtggaagcacctggcccactatgaacagtgccctccccagactggtggttctgggcgtataataaagaaaactgagcaagccaggggaagaaaagcagtaaacagtatttttccacagcctctgcttcagttcccagctcaaggttcctgccctgcttgagctgctgacctgactttcctacctgatggaatgtaaaatataaggcaaaataaacccttcccttccccaagtcatttttggtcatggcatctttatcacagcaatggaaaggaagctaaggaaatgttctagagcgttgtactaagaaaactgacttgcagatttgcatccagccccaatcgatcagagcatgagctagaccttacatctgaatgccattttaaaactctgctctaaattacaagtgagaccctggaacctaccatactacagagtgttcaaagaatggttaagaaaggctgcaagtgtgtcatctttactaacaatcccaaaatactcttgttcttcctaacatattgttcagctggagacgacagtcatagtgcctattgtgcatttcctagaagtgggagccagcttttcaaaaagtcaaataattcattttacaataagcccccaaaggcacaccagttagcatttaggctaagtatgtgcgacgtcacccacagctgctttgtctggatggtttagacagagctccccctcagtgtgagtgctcttggagtccaggccaaaggcaagctaaaggaccacaatcctgtctaacagccccctgtgatataataatagtccgtgtggaaaccctcatttttcaaaatagccacagtaacataacacactaaatatcagaaatgtcatattaacaacttagtaaaaataaatttaaaaacatttaaaaacctctaacactgccataatgataaagaatactatgcctgatgtttacacgaataaataaatttaaacaaacaaacaggagaaaaagaatagacctgctgagctctcagtaaacggaagtgaatttctatgggctttaagataaagaaatagctgatgtgttttcttgtttttcacttcatttttttttaaatgcagtgttgcaaaaggccattttcacaaacatgtatagaatacttgaagcatattcttccccagattttttttttttttgagtgaagagcatagcacgtcatgtaagagtcagtattgcaagcacacatctttggtttttatgtaaattcaattctaaacccccatggacacaatgcactattagtacaaatgtcactattgtctgtgtgaaagaatcagctaagagtttgcagcattaaccctgggtcttgcagtgagaaactgaaaaaacaatttggaataggaaaaagattactcagaagtactcagagtccctcagaatgaaaggttatttcaacccagcttgtgctgacttaggtaagcaaggttagagtttggtagctaatgcttcctttattctgaatgttttaacacagaaagactcctttctcagtctcttttagtattacatcagggacacaaactgcctgcatgttatagctgtggaaccaggagcacatgaattgacatggcacagtagagaaagcagggtagttcatcagctcctaagtgcttctgcctgctggccaccgacctaccaaggggccggagatatgggagccatttctgaatcatctgtgaggagcatctgtctcaagccagagcatctaccaccatcagcccatgccgggggaaactaaatgttaaacccaatcattctcaggcagttttctccaggctccttctattaggcaagactccaattcccacaaactgctggttcccacagcaaaagattctggagccttgtgacatttgtggggtgatttctccccataaaaatcacacaccagtgtttctcctgctggaggaccagactctctatgtacacatttcttagccccaggaggacctggttaggcagctaccagctttgaatgctcggtatggtcaaaggagttttgttctttcccacacagagtttgctttgtgtcatcgctttctattttaggacatgggtgtgcttacattaatttgatgattctctctagaaggaacacatggaatgtgtaatgctgtcttcgttcttaacagcttccgtaaagcaaggctgctgcatcccctactattcccagaaaaacgggggtggaatattctgggatttggatcctttttttttttttaaacttttttttgccatgaagacatctccatatagcattttctaaaggggttagccaagaacacatcctaaacaggaagtgttacatgtgttaccatttagcattgatacatcacttaaacatgagagcagttagggtgcatttcccccaacagtgtgaactcatgcacatggccctggacaggtgtctggggttctttttcacctcctaagcacttgcatgttataacctggttgggttccacaaagagggaagagatgaacacaggtgtagaatcattttcttggaggaaaacaggatgggagtatgtacattgaagaatgaggtgtgagtcactggagaggcatttatatgttgtgccaatgatgggagacattaacttcattctaatggtttttaaatgttgtaagtaggactaagaatgtagctcacctggcagaacccttgctttgcgtgcatgaagtcctgggttcaatctccagcgtgtcacaaatcagatacggtgatacacagctttcattctagcactttaattcttatgtccttttaattcataccttgcaggcaggatgaccagatgatcaatgccatccttgccaaatagtcggttcagggtcagcctgagacattgtcagaaacaaaatgctatgagtagacctcaccttgactgttctgctaatgaatcaagaatggtctactagcaaaagggtaaaggactggagaaggatgggcaagagagggtagcagggaccatagatgtggcaaagcatagtatctgtgtgtatgggaatgtcacagtgattctagtaatgtgtataattcattggtaatgataatcacaataataataaaagaatggtcttacagcatcctctttttatcacctttatttagtttctagactctgctcttctattagaaagtaatgggtttgtttccagtccatttaaatttttagcttatgtctgctggccaaattgaaaagtgttctcatttcttttaacagcaaatttaattttacttatttgctttccttatctcctctggtcatcacccatgatctctggcttctttcaatgcacagttcagtgatactttccagcgtagaggagactgacttcctggaaatcttaacagacctgtggcaagaaatgatctctccattaaaacgacttgagcaaatcaagatcagcgcagtatttgtcagtgtgcttggcaaagttttgttttaaaagatgttgatttaaattatattggttttagtggtcaatgatgcagtgacactgtgttttatcttttcctcttactaacagctgtccatcttccttcattctctctctcttttttcttccttacttccttttttctttctaattccttatgctataacaggtcttgaaatatttatgaaaactttaacatcaatatatttggtcaattcatagggctttgacacagaatgagtacattggatttaaaaaaaatactcaatttacagaaggtccttaggtcacagacttggccaaatgagttgtaaaaggtgcattggaatcacatcagaaagatgccaaaatgagggtgaagagtccagaggatgctatgtagagtgtgcaagcccttagaagctttggggcagaggtaacacatggtctcagctatgctagtaaaatgaccaaacctcggtgaacaacgagatgaagctgacacaaactctctagtgaaatgacagggacaggtaattaattattaaaactggttctgtaagtgacaaaaggaaaaaacaatacttctagatctccgtttcccatgtgttttgggtttgtttgtttgtttgtttttgtcttaatttaatcaaaatttgacaatctgtctttatgtatggcaacaatatttctaattacctgattttaatcaggggatgtttaaactctagtttctcccttacattgcctttacaaagaactgaggtaaaccaccaataaatgaagaatacagggttgctgggaacactctattcctcttcctggactctgagcatctatgcgtcagtctccagcaagctactcaaacacctaagacccagaaatccttgggaccacagacgagtacttcccagagaagatttatagaggcaaccaagcattgcagagtatcaaactttagagaaaaacttggatcccactagattagcttggaatcacaggcgggagggtcggaggagctatcttagtggactaagaccatgtacacaatagtagttcttgtaaatatgtggaaagacttgataatcacagctctacccttaaggctcagtcatctatacagaagatgatgcaggaatactataagaaccagggtgacagatgacttcaaggaaacacagcagggcagagactggcaatatgcacaagctcaaaccagacaaaatcccgctatggcggagggcaggtgagcacaaagtcccacccctaaccaaggagctaatccttggcatttgattactgctgagtgagggaaagtcagttttcttcaatggagtgacacctatataatgatcacactttagggcagatgccactcccaggagatgaccaacacaatttggactccatgggtcttctgttttgtttggagatgggggtgtatgagggcaggtgggtagggaggtagggagataaaagagggtctggaagaaagtggaagaggggaatgtttataagcaaaataaaatatgagattattgaataataaaactttatttaaaaagaaagagaaaaggtgaaagggaagagaaagtttcccttctggaagtaaaaataaagggaagggaaaaaaagaaaaagagaagaaagcagaaatggaggagagaggaagagaagaaagaacaggaaaggaaagaggaaaggatgagagagaaagggaaggggcttttcctggttattcaaatcaagccttaaaaaaaacacctactgattatccagttctgctgtcttcccgttaaggacccattactgaagaacatacaagatcctggaagaatcagaacgcagaaaaccagcttcaagtggtaaaataacttgcagactatctacactaattatctacatgtgctacaggaagtgagcaacccagggtgattgagcaaggcagcatcaaggagccaaaacttgaacaagtgcttcaaggaacatagctttctattgggtagagaagagagcatgttttgggaagtgagaagccctgagcacaagcagaaagcatcagtgtggaccaagcagaacacatttagacaggccccaagcagggaattcaagtcacctcaagggcaagtctttagagacttaaagaccacttaaaatgttctatccctagctctctctgtgtgtgtgtgtgtgagagagagagagagagagagagagagagagagagagacagagagagagacagagacagagacagagacagagacagagacagagacagggaaatgaaaaaagagacagacaagccttactgcatactacttacacgtaattctgattttgtaaattatgtgtgacatcggactccccagacttccaacacttaaaaacactggaatgagtcaacagcttcataatgtgactactctctctgttaattattcatagtttcagctagggatatagagctgttattttaaaccctaatcctcaaagcattctggattttgtttttaagtgaacagtgtgtggctccaaaaaggagtgaacacctaaaatgttaaatatgttatccaaaacctaatgttgttttaaacttaaaccatcctaaacatgaaagatgagagttggttcagagctgggaacacagctcaatacatctgggacatccggtcacctggggtgacattttttttctaaccctttcattttcattagctgtctcagggccaacaattctgaggtctgctgtggttgagtgtatttgtgtacagtgacctttgaggtccctaaaagaggcacctagcctctcaccaactctgactaatgtatatggagagaaccccataaaataaacatgctctccattgtttgcacactgatggagatccccactcgatgcttgcctgatgccagtacaaatggtgtttggaaagctaagcaaattccatttcagtctgaagctggatctgatgtactccaaactttaggaagcagtgtccccatagagatactctgggacagctcttggtttggtcattattccactaatgcagcaattatttctgtctacagagaaagcacaacagcctcagagcagctgagaagagggatgcaccatgggagacaaacagctagaaggaaaagcagcctctctctgtgctctatgccactcgaaagcagagcgctacattccataaattgatcatctttttgcacattgaaaacctgaaattctccttaactaacttaccctagagaaataattaaatgtgcatccaaattcagctagaaggatgctggttacctagatgaagggccacaggtatattagttttctattactggtaaaccatggtaccataggctcagcaaccgagaataccataaaattagattatttgacagttctgtaggtcatgagctccatgggtttgcctggtttctctgcttttaatttcagccaagctaaattctaggcattagctgggttttgatttccctgtggagatgatgggagaggtctttgtttcctttggtaatgggacttggatctccatgttcttgctggttttcactggggaatatagatataatttaaaatatttttacatctcaattccagttccctctctctcttgaatcctcccatacctcccaacgacccctatcccatcccccatccacgcctcagggagggcgaggccttccatgagggatcattgaaatctgtcaagtcatttggggcagcgactaggcttgtgtatgtaggctaagagagtattcctccatgggaaatgggctcccaaagtatgttcatgtactaaggaatcatccaggttccactgccagaggcctcataggctgccctcactgaggactccagctagcttttacaacctcacacttctgactagggctgcagtctccctctgtgaagcttgaagagtgaggccagaacttgctgcatgatgtctctctgcctgtctttctatctccctccccccatatctccttctcctaccaccttcatccacatgagtgagttggtcctcctaataatccaaaaggaaggccactgaccatcaataagtcccttctccacttccatttaacatagacacagagtcctgcgattatagcatgctgatcattggaaggctaccacagtgggataccagttagacacagaatttacttgggagcaagtgggatttaaataaaatcaacaacattaaaaatgtttactagtgtgggggaaagctgagtaaaagatcacattgacaggagtcaggagatagcaggcttgaggcaagcctggattctggagcaagacattatcttgaaaaaaaaagtgtacaagtttgtttgtgtgtgtgttatattattatatgtgtgactaaaaaatattaaaataaaaagcaggctcccaaatatactgatgttttcatcccatcttcaatggtgaccaaactgtagtttgcacggctatatatgcacagctgtatctacatttccttaacatttgtatttctacttgattgtaaatgtctactaaaaaacatttagtggttatctctgaggtaaggaatttctggtgaatacagttaggttaacaagtacttttgaacttaactaaaataagtgtgaatagcatctacaacacacacatattttaaaagccttatttgcaaaatacactcatatttaaaattatctttcgcttacaaattgaatgcattaggcaatcctttgctcaaaggatccaacataaacactgaagaatgccttttctgtccacagtgtcatactcattatcatggaacttaacccagttcccatgggcgacccaaccccaggcagccttctgtacttcttagaaatccagtctctctagtccagtgtcccgctagttaataagccacattataaccgaaaactcttcaatgtcattgctttagtcatctctgagaaattctaggacgtggtgtagccctgaagcatctacatgcctgggatgggtttggtttaaatttcacatagctaaaaataagtctttctcctgcttttggttttaaaggataagcagatctagcttttgatgtacaaggcttataaatgaaacaatttgctatctccacccaaaggcagctcacacaactccagaagaggctatctttaacagtttactctgtgttccgactgctgtttccctaagaactcactgtatacaaactttgttcctaaggttatttctgttgatgccaaattgacttcaattcacaaaaatcatgtgctgcattcccgtgcaacttggatgttttgttctaaagaaaacaaggaatattttcccctcgtcagcaaccattcttgtttatggaagaaccacctccaccctgtagatgatactcaaggccagttaccaaatgtgtcttacaagacatagcaaagagttcaagcatccaagactagactacagactagatcctgctggtgcagactgttggagcacctgagagcattatggtgtacaatggagttctctacgaaagtcctggaatgcaaaaatctgtgcatcctaattctacttctgatccttgctatctatgtgacgatcagtgacgttgaattctttgtaaaatgaagataacagaactgttgtgaagattgcatgaattaaacagatggggagtccttggactacattctatgttgtaaaaatggcatatcactagttgtaatagagcaaggcaatgataattataagaaccatgaaagggagagacaatcacacactgttgagagagaaagagagaggctaagatgtaggaggaaatgctgaccacgccgtcttggggctggcacaggtgctgctgactacacccgcttgggcatggttagagtgatatagcaagggtttaaacatcagagaggcacacacacggctctctttttccctctcccgcctggctgagcggacgagcaggcatctggtgtaaacctggtcactggctcagttgcatgagtactttattaataaactatctgtgatcaatctagttctgactccacattgcgttcggcattaccaagacaggcatgaaacaggcaaagagagaaagagagagagaaagacagacagagacaaggtccttctagggcctttgcactgctctggagcaggtcacatgcccctctcataaaaagacacacacagtctattttcctattttattcaggtctttgacataataatactatctcagggaaactcacctgcatcacccaattagaaattataacctctgtctagcactccacatctcccttatctgttcattttttctattgcattttagcatatcatagttaatgtagtttatttatcattttccctgtatataaatctcagacaggcagagatatatttttgtctgtttatatatcctcaacacctatgaatatagtatgtgattcatagttggtctctattaatgcatgtttagcaagagaacagttactttcctcaagagtgaaggctttgcctaaaacagggtgatggatattgcaaacttctagcctgaactccctaagcaaccctaatgggaaccccagagaatgtgtgcagccaccctaggatgattcaatggaagttctaaagaaagaaacaggcagaacaatcaggtaggtatcatgcatgacacagggtttttgcacctctttgcacctctttttacttaaaaactgctaggcaaatttttctgttggggaatgagaggcatttggatctctgttggctttctctagcagtactgaagtaccggcttgtaggcactaatgtcaggaaggagccttgtgacttttgacatattataaaaattatccacatttttggacaacaaggttcccattgctttttggactgctttcagggcaacagctgctatggcaatattagcatctctacttcctgtctgtctttctgggaaataaaatcccatgggagatgtagatcttatctcctcatttgctccttgagatgtagtgtttggcttaggtctctagttcagaagcctacctgaagattcctgtgaatacacagattgagagggcttcaggttaacacttgcatttcctagggttcagtacaaaccgctggaataaaataactccaacaagatggcagagcaatttctcataagtaacagctctgtggttcctagaacaagggaggtatggtgatgcttcacatcctagctttcaggcctgagttctggctgactgatctagtgcctaccatgacatctgtcttccaggcagcaggaagaaagaaagagcatacagaacacatgtccatgccttaaagtcacaatgtgggtgtgtcaatcatcatttctgctcatactccgactcctacaacatcttacactgcacagctagttgtgaaagaagctgggaatgggaggggttttgtttgtttgctgcttgttcatttgtttgcctgagctgtagattattgcgtgccgcgtgcgctcaaagatgatccgtagtccgtaagactaagatttctttattcagataaacaccaacccaaacgcaagccagagagtgccgggggcagcaaggcagccaggacagagagaaggggctatccacgtgtgcgcagtcccttaagaatcgttcctcatcttcttagacctcccctgaccacgccctcccgggagtgtccccgcacacctgtccggggctactaggaggcagggctacagtgtctccctacactgagctgttgtaaatccaactgccaaggaaattccttgatcaaagaggagagaaagtggaagcatgagcatcgttccatcacagtctccatcacaggtcacctttccaggcacatgatatccattcacacttctggctaatggagaatggcgcctcatccctgggggattcaacacagggatgtgtctgagctgcttactgtatctaactccagactctggttcccctatgaggaactgtctttccactaaactcaatgatctattgaggagtcacctgtcacttctatacacatactcaaagaagcgcatgacacacatgatcaataatggcagaggagaaacaaattttacattttaaaccccttttgagaaaactggggatgctatcttttaaatttggtgggactacaaaggcatttcaagacaagcataaacgaaggcagtcaatgactacctagtcaacgttgcagaagatagtagttagatagttgtagatagtactgcaatactatctacaaatgtgaagaagaaagacattctcaatcatgagcagaaaggaaaggataaatttcataaccagagctagcgaggagcccattatgtccaacacaaatcaacaaattctctgaaactaacagaagagaaagtaaggaacaaaataatccaacaaaataacagtcaacgaatttacaggaactcaatagttcactgaactctttcagtgataatttcccatgcaaatggcctcaatttaccaacaacaaaattcagattagctaattaaatcagcaaatgaggtccaactacctgttgtctccagaagacacacctcactgatcgagatacccatagatagtcatagactactatagtagtcaatctatcaaaaacctagaagttgaaaatgacttgacacagatgttaaaccaaaattaaaggagataaagacagccagtacatattaatgaagggaacaattctcaagatttaacaattgttatgaatgttggggctctcaatttcataaaacaaacactaatggttgtagaaagtcacataggtcctgtttatgatgggtaacttcaatatcttactcttgtccttagataggtcattcaaactaaaaataaaaagaaacggcacggtgaaacaacaacatagatcaaatggcctcaagagataccctcagaatttcccatacaagaatatggaatcccctttcttcttagcaccactgtactttctgtaaaatctaaaacattttagaccacagaacaatatttttcttccatatatctttttattaatattaattagttaattaatattaattacacttattcatttattttacatgccggccaaagtttcccctccctcctctcttccaagtccctccttcctcctcctactccccccaatatactcagagaacaattcttaaaaagtatagaagaatcagaataggttttgcatcttaccagatcattgtggaacaaaactcaaaactcaatagcaagagaaaatacacaaatacacagagactgaacagtgtattattcaataacaagaggattactgaagaaatcaggaagggaaattttgtaaatcttgtttgttcatttacttattttttgttttgacacccttaccaaaattttccctctctgtccctccccccactccttcacctctgtttctcttcagaaaagatttccccaaaagcaggcaacagagtcaaagacagcccttgttccactgttaggcatctcataagaagaccaagttacacaactgtagtgtgtgtgtgtgtgtgtgtgtgtgtgtgtgtgtgtgtgtgtgtatgagcgcgatcaaagagggcctatgtcagtcccatacaggctccctagttgttggttcaatctctgtgagccacgatgagcccaggatagttggttggttctgtgaattgtcttgtggtgtgcttgaccccactagctcctacaattcttcatgaagggaatttttaaaatcctagaatgaaatgaaagtgaatcacaacttatcagtacctttaggatacaaataaagcagttctacgaggaaacattacggctataagtacttacgttgaaaacaaaaaaaaaagaaaaaagaaaaaaagaaaaagaaaaaaaaagaaaacaaaaagaaatccagatctcaaatcacctaatggtgcaactcaaaatctcagaaaaactccaagataaacccaaagcagtaggaggcaagaaataataaatacttggctgtaaatgaatgaaattgagactaaaagaacaatatgtggaattaaccaaacaagagtttgttctttaaaaaaattaaacaagattgacacatacccccagacaaattaatcaaaaggagagagaagattaaatttaataaattaagagacccaaaaagggatattacatcatagtccaatgaaatacagggggtcactgagaaatactttgaaactttgtttttaaaaaagtaaaattgaaaagaaataatttcctataaatatatgaccccaaaatttattcaagaagatactacttaaatggcttaataacaacaaatgagattaaaacagtaatttaaaaaatcttcctacattttactcaactatgaagcctgaaagctacaatagtgactggtctggcaatacatgccaactattgtaccagtcttgccagaccagtcattattctccatgaagtatgatagagttccttggaacttcatgaaagtatccaaccactttctgattcaatttaaatcctactccacaagatgaaagtcacatctgataccattaccaggccaagaacttatggtttgataagtcataggccctagttaaagtctgccactaaatacttggagaaacagtcagtttctctaccactgtagcccctggcatgtgagccataatccctagttaagtagaaggtcacaccaacaatattttggtgtcacaaattggtcttggtgggtggatggggagtgggtataaccaggaacagttgtaggggggagagtaatggtgaatgtgatcaaaatgcattgaatgaaattcccaaataactaaaaaaaaaaaagttaagtttctcacaaaaaaaggctcaatattggatgtattcactgttgagttctatgaaaactttaaggaagagttaaaatgcttatcaaactgttccacaaaatagaaaataaagagcactatcaaattcattccataaatatagtgttgtcctaagagtaaaactaggacaagttttgaataaggacacacaacaaatagaaaactatacaccacttttcctgatgaacacagacacaaaaactctcataaaagtcttgtaaaccacattcaagaactcattaataaaatcacacatctcgaccaaattgggttcatccctggaacacaaggttggttcaacatacaacactcaataaatgtaatacagcatattaagaggcttaagaacagaaatcacatgatggtctcaatagtggaataaaaagcattagtcaaagtttagtatcccttcttgattaaaaaaaaaaaaactctgaagaaagtagacaaagacaaaatatatctcaacttaataaacactacatatgccaaacctatagccagcatggggtaaacaatgaatccccactaaaatctggagaaagacaagagtgcccactaactgctcttaacatattcctcacagtcttagctggagtagtaagacaagagaaagaaataagagagagaaaaatggaaaagggagaagttacaaagattctttattggcagatgacatgatactatttataagaaaccccaaagactttacaaggaaattcttatatctgacaaagactttaaacaaagaaagtagcaaactacaaaatcaatctgcttataagaatctgccttctctgtgtgccaaaaataaatgctgaggaagaaatcaggattctggagaaatcttcaaaaggaaaaagagaatggaaagaggaaaaagtaactgtggagtccgatgttaagtcctcaggaatagctggggagtggaacagctgggcctgacaaatgcatggttttctcataggcaggacatagatttaaattaatatgtgtttatgttcatagactgtgaaagcagacaatggggagggagtcttaagagatgaggtggacagcagacaatggggactttttgaggaaaggatcaaccaccaaagagagacaaagcggaaggtggtagggaagggggtggaaaggacacatacaatgacagatatgtacggaaaatgccctaacaaaacctattactttgctaacttgaggaattaaaataaataaacaagtcttgcactaggtaagttaaaggaaaaaatatcacagttatgtgtccatacctgtcaccaaagaacccaactatgacctgaaatgtccccttgacggatctctctaaggccttcctttccctttatatgtcctcctggaaccagcatggcttttgcaactttcttcctgcttggggcatatttgggagttgaagtatttttagatgtggaagaattacaggcttttagaaagaattgtggtttcattggcaattaaatttctcaaaaaaaaatttttttttggtttctatttagttcaaattgtgtccattcttatatatacaagtgtagctaaagaactcatgtgaccagaattgcattttgtgtacagacatgccactctgaatgtgcctgatcttgtcttctcttaaagatgtatttgagtgtgtgtgtgtgtgtgtgtgtgtgtgtgtgtgtgtgtgtgtgtgtgtgtacatgtgtccaggtgccttcaggggccaaagaaggcctggtattcatcccctgaagctgaagttataaacggttgtaagccacaaatgtgagagcaggaatgcaatccttctgaaagagcaggaagtgctcctaaccactgagctatctctccagtgccccgagttcttttctgattgatctccatccccctctgcatctccacctcttcctcctttttctctaccatcattgccaacatccttggtaccttctgaaacaacaagtctgtatggaacggttacatccccaatctgattttagctcctagttcaactctcattatttgaactcataggctttgggggaagtgataggaaagtcttgggactgttacaataccatattctaatgtggtccctttagagtaagagttgccttctgcaatagctcaaggtcatccagcttagagtagcaagaaggatttgggatacattaattttctgagttttcctggtcagtttcactgacatttcaatatctaatggcatgcagtttatctctcaaagttttaataacattttttcttagtatttttccaaaacataacaagattaccagcttcctagtctgccacatttacctacacttcttaagacccaataaactatgctgcttattttgcacttccttgtggtgggactcctaaaggaatattctctgttaagcaggaaataccatcagctattgtggtgacaagcctcaaagagcaagggcttaagcgagataatttatgggtctggagaaacggcttggcctctaagagtgcttgcttcacagctgtcttagttaaatgtctattgctgtgatacataccacaagcacagcaacttgggaaaaagggccttaacacaccttacagcttacagttcttagtggggagcactcagggcaggaactcggtacaggaacttggaagcaggaactgaagcagtggaggaatgcggcttactggtttgctcttcataacctgcccaccctgctttcttataccacctaggacaacatacccaaggatgtccccacctacagtgggatgggtcctcccccattaatcaataatcaagaaaatgccctacagacttgactatggtgatcttgtggagctattttctcagttgagggttttcttcctggaaaattctaggttgtgtcaagttgacagaaaaccaagcaggacaacaatcatgagattgagtttggaacccagaaaccatgaagcaaggtaggcattctgaatatacctgcaaccccagctctaagtagggcaaagatgggaagataagtggagcttggtggcttttgaactagcctgggatcaaaggtctggggcttagacagcaaatgatgagaaaggacacctgatgttcctcttctggtctgtgaaaacaagcacctgcacacatacatcaatgtacactcagacagacacatatacaaacacacacaaaaatcaataaataatctctctcctttttcttcaagaccaagtttctctgtagctttggagtctatcctctctgtagataaggctggcctcaaactcacagagatctgccagtcctgggattaaaggcatgtgccaccactgcctggcaaataatctctttaaaaagacaatttctctgttttattttatttcatttcattagtattccttagatgtctgtttgttttctaacaagaaacagaaagagtgtggatccagatgggaggggtgtggggaaccggaggggagttagaggacgggaaagtataatcaaaatatattgtatgaaaacaatctattttcaatttaaaaagacaatttatcacattcttgattgtaggacacaaatttttcatttttaaacaactgtgagctgagggtgtgacttataatctgtgttgtgtcagtaattggttatgtatgtctgtcttcttgaggttacaagaaatgtgattttgaaacttttagtgtcttaaattttgttttcctctcttgtaattgtcctgatgttggcaacccaggcctgctaaggaggttctatcttcctcagcataagaagtccaagtttaggtcccaggtagctactcgatctcttgagttattcactacccagtgaaaacagtaagattgacaaggacatacatgttctttcactttaagatgctgtctgaaaattacaggtgtcacattttacttaacttacatgtccacatgtacctgaacagcaacattcccacaaagaactgaatgtttctttagtgggtagaaaagaattaatgcttggcaattgcttaagaacactcttctgttaaaattcctattcctttagctaagcacaattgcccaagtcgctatttcctcaaatccaatacgaaaccccatcagttccgaggacccaacaaatctgctcagtcaaggaaattcatatctctatagatggactttcctgaagccatggcaatggagcggcaagattcccatgacagccatcggagacacttccgactggatagtggacatctgttctgggaacctttccatgtccaaccacccacgttctggggccttttccagatccatcataagctttccctccgcacctcctgttttcttctccctcatcacgcatgttcccctttcagcctgcattcaatgggaggcacgtttgccttctcctgcctgatagcccatgtttgaggaggttcattctcatcactagcagcttagcaaatacttttcctaagtaaagacagatacaccctgaaaggaattctgatggagccaatggcatagatggcattatcatgttacttcagaagactatcaagaagtctagagaaggatatagaagtcaaggccaaatgcccaaaatcctaataaatgtcacttggcagaaatgtagcatggtgaaggttgaatgccagggaggcacaggctgactgcggtcttaaccctttataaataagtcacaaagtaacttttcccatcttcttagcctctaacaacataattgtctgtatttgtctaccagtttccactctaaggtctataataacatccccatgattcacacatcagggatgatgatggtatctgctctgttagttcctttttaggtgtcagtgatgggtattcatgaactccagcttcagaaggaggttctgtcttccccttggctccctatttctgtacatcaactgttcatattatcctttccaatggctgctctctgctgtccatactttctctccctattggcttacactggacaagtctgcccatgctagcgttaaagcccacaggatctactcggcttgtacttgacactatcggtggtttccaaccagctttcccagtatctgcaactcaccaccattcttgggatttccagatgggacagatctcagatcccactagcatcttggcccaaacatggtggattgtagtgtgcctttcatggtgctgtctcactgtggccattggaggtagaggagagtccagtggcctcataccactcacaggccgtctctaggtttggatcaactcctgtaatgatagaatgagcaacagccctttaaaaagaagtagactttcaggttttgctttcatggaattatacatggacgcctcatatggtcaaaagaaggaagctctgcacgcctatatttaaatgttccaagtaattcccactcgctctaactccatccagatgtgggcactcggtgcccatgtaaattagatggctttcttttcggccttgtcgagaatctgcactctgactcacacagggggaaaaatggaaagaatgtgtggcaactccacacaggacatgctattttaatagtacacgctctgttgaagggaaaaccagggtttttgtgctgcaaacaacagcatttgcatttcgaggggccagagactattgctcagtaccaaccatgtcaacatggcctttcgtcctggctgacagctattcccgtagctgaatttctggtttgggttctaagtattcttgactaagagccacatctgttctctgtccccagccttgctgcagggactttctaaaatggaataattattttgagataatgggccctctgtagtgcctacagcactttccattctattctctctctctctctctctctctctctctctctctctctctctctctctctctctctctctctctctccagtgagcataagtcaggcaaatgtgggtagcaaaaacttaaagcaagaagcaattcatgttgcctatcatgctttatgtttcatagaatgtctcattataatgcattccactaaactccatttcactaaatttggctcttacaaaatggagaaagaagggagggaaggaggcaatggagacagggagggagggagaaaagaaagaaagaaagaaagaaagaaagaaagaaagaaagaaagaaagaaagaaaacagcaacccagtcttgtcctacttcctgactgctctttgagaaaacctgctccctgtctgtcagaatggaaacagtcttcagttagtccttatccaaatgcaccttcttttcgtgagacagcagggagaagatccacaaatgatgggggtgcctgttgatgccagaaatgtattcgttatttaattacattgccaggatggcatgctagcagcccctggcactgctccagctctgttacccacaagtcttgccctcacccatcccagagtctgcctgagacacaatggggggcattgtgcttatccctagatgagtgtgttgatgagaaatggaagttagaaaagagaataactcataactgagcacatgtcattaaagcacaagtgccctgggatgataagagctcatgatgctgaccaggctcttggcacattcaaagtgctctcttaggcaacatcacagttgacccccgcagccattctgtgtagaggaccaggaaggttgcacttgggctgcacagatgagagaaatgaagcaggggtgctaacttgcccaagatcacacagctcctggtctccaagaacctgatgacgcctgtgcatgagaacacttcagctcagaaacaaataggacctctattctctgtgctgttgatgttaatggcaacccagttaacggtctgcttctgtgtatcattccagatgtgaccctcaaaaatgctcatgtcctttagacatagacatttcaccttgagaaattatatctcaaaagaatgacctgtgtgcatgtacatgcatatacactcatgtaaatacaatattagtcagtttattagccagttggttgctggggattcagaaagatatgagatattttcaacagtgacgtcagttgcagaacaacttatgctgtgcaggaaactgaggttcaaattgagcagagtatatgtgaaactgataaggtggtagagatatccatgtctatgtcaggagtgagagaagcagactgaggaccaaaagaatccaggaggtaccctatccagagagtaagaagccagccatgtcaaggttagtctggggcaggtagaaggatgctgaggcagatgggggtgatgatctggactcagtcacaaccatgagtaaggctgagggagagatgggcagggcaactaagagatttctctcagtaactcagcagtctgggacccaaggaaccctgggggagaaggcaagtcaaatggagtaaagacataagattgtatagctatggccccgcatggagcctacttgaccatgggcagtgggaaactggcctgagaatgtagaggggctatagtgctgccggatgcacacacaggctaccctgataaccaacgaagcaataactgaggaagggttcctgagcacaggtctatctgctttcagggatacagaaaaattcttggagaccatgtgggatagggctacagacaggccactggaatggaacatcatagtttataatataccccagcgaatgtcctacataagagatgccttataaaatggagaatgcggccatcaaaggaatactatagtcaggtgtggtagcatgcacttgggaggctgaggcaagatcatcattagttcagcactagcctgggatacacaatgagaccttgtcccaaaacaaaaagaaaaaaacccaagagaatattaaagaatatgaaagtgctactcaaggatgacatttaactatgaaaatgtgatgctatattaactttgtaggttcaaaacacatagtgtatacattctatgtatgcatgcatttatatgtatatgatccatagatgtgtatatataatatagacaggaatctacacagatgtgcaagacccttataagataagaaccataataataatagtcaaacgtctccttattgtcctgttaaaggtccttaataagaaaaacttaacaccatttatcttgatattcttttcttttttaatattcaaattagctctttgagaattttgtatatactcgccaccccccaactcctcccagctctgtccctgtgtcattccctaccacccaactgtttttaaagatccatgaagtacagtgtgtgctgccattatactcttggatatgtggccttacacggcagtttagtataattgccggggaaatctcttaaaggaaactggctctccttctcccagcagctaccatttagggactttccaaagagttgtctttgatggtcctgcagtggtccagtctcagcaccctggttctttctctcctgctccacctgtccatttcctctgactaacttgccaagctcccaactagttccagtcaaaacccactcacctgcgccagtgattcacttccaatttttggagagccaaaaataccactggatttggttctgaggttggaaaaatgtctccctttcaagtcctgtgccacagtttgtcacttcgcccagagactggcagcctcacttaaagcagctctgtaaattttggccttcagtccctcactgcaaaagtttaaaattcactaaaaggctggggctgggataacacagtatgctattcacaccagcttctctgctctcctcatcagtcccgattcctttccctgctacagacaagtgacattttcaaggataggagaggctggagcgtgtgctcagctctcacagtctttagtccttggctccacccatcaaaaatgccagctgtcagaaagcaagttagaaagagagtcatgtaagagtggactgggcagagcattcggggagattgctcacttgggagtgtcctcagtgtccatgtaataacccaggcatggctgtaacttcaggggggtcagggggagggggcaggtagatctgcagagctcactgttgaccagaaagcttagcagaaaggattcagtaagagacctctggcccctgcatgtatgcccacagaaatgcacagtgcatacacacacacacacacacacacacacacacacacacacacacacacacaaacacacacaagagggcataagcaactcacttttctcctaaaatctagactgggttaaagacaaccctcaagagaagacccaagacccaaactgtcatcctcattgccagcaaggctgatccacgagtaattctggtgtgctatgcatgcttcctcataatttccatgtttgaggaagtgcattttctgaccttcagctcctactcagccatatttaacttcctcaccactccagggcctcccatcagcttaacactgagcttgctgcgtgaccaaggctaggtgggacccatgtcccagggtcaagcacatgccaataaacaaagaataggagctggcactgcccatgcctacttccactcccaaacttgccatctggaaacactctacccagtgttcaaatgaaggaaggatgagaacggagccgtgctgggattagtggcttttcctcaatgtagaaaggccaggagtcaaaggatgcctcagctatggagggcactgctcctataaagggtctgagttcagtaccgagcacctacactgggtggttcacaactgcccagaactcgagcttcagatgaccatatggcctcttctggcctccttaggcacctgtgttcacctgcacatcctcacattcagatataaacatatacatgtaattttaaagtaaaaaaaaaaatactttttaagcaagaaagataaggaatgaaaagtgggctcttcgccccagtgacagagataaagactagaaaaggaaagctgccatggttgttttccttgagtggtgaaatcgtccatctttctgtttctgtaccttctctctctctctctctctctctctctctctctctctctctctctctctgtctctctgtgtgtatataatttttcacattttataagtagataatatatttgaaatcaagttaagcattaaaagtaattatttgggattatattctaataaaaccaaaaaaggaaagcaaagggaaatcccatcccagctcccacctgaaagcccatgctccttgccatctgatgatagctgagttggtgacctttctgaccacagaaaggaactctcagacttcaacccagggcaagaaagaacagagctgtaaggaataaaatttcaacaagaaaaggctttcttttagctctcaaaaaaaccaatatagccactgggatacctaagcagctactggagaccccacagaagatcaaatccatagcaataggactcttttgggatactcttggggtactcctagagtgttgatttgagtgagaatgacccccagaggctcatatgtttaaatgcttagtccctagttagtagaactgtttgggaaggattagagtgtgtggtcttgttgaaggaggtgtgtttcaggggatgagctttgaagtttcataagcccatggctctctttcctctatctctctcagtaaagctctcagatactgccccagtgccatccctgttggcttcctgccatgatgatcatgaattataaccctctgaaactgtaagcaagcccccaattaaacactttcttttaaaagagttaccttggtcatggagtcacctcagagcaatagaacagttactaagacatctggtaaagggtaggaagaggctgaaacagtatttgccaatgtgtttgtgaatttggatcacaagtattgttggccatggaagtttgtattcatcttgaaggactaatggtatacagatggctaattccgagatacagaatcatcacctcagtctgaactggtgatttactcaaacaaccatgcttgtgttttctatggctgtagccctctggaatctactccgtgtagagaagttaagaattcattcaaaaacattcctgtacaatcagatggcatgttggaccacacctttgtttattttcattttcttaatttcttgttctttcatcggttattccaaagttgttttacactatttattttctataataaaattttattttttaagaatagttcatacaaaaataatggatttcaacatgtggttttcatatatataaatcattgtaccctgttctgatttgtacccctgccttccccaattcctccccttgggttttggtacattaccttcttactgccaaatagcccccttctgcttactacatacacacacacacacacacacacacacacacacacacacacacacacacgaacttatttatttaagaataaattcataatttgtcttactttcatctcaccccttcctttagacttcttccttactcagattatcccttctagtttcatgtcctctctctctctctctctctctctctctctctctctctctctctgtgtgtgtgtgtgtgtgtgtgtgtgtgtgtgtagatattcacatgtatatctatttaagtaagatttcctttgattgactatataatggtgccaagtaaagccaaaaaaagaaatcaatgatgactgacaagagatcttagaaataaatcaaacggctccaagacttcctgccaatcagctctcaatgacagcactacacaaaggggtgagatgctgatgttatgtttccagttggttttatatttcaatagtatgtttatttatcaaacatgagtttgaaaatgtatatgctgccagttggtggtggcacacacctttaatcccagcactcaggaggcagaggcaggcagatctctgtgagtttggggccagcctggtcgacagagtgagtgccaggataggctccaaagctacacagagaaaccctgtttcaaaaagaaaaaaaggaagggagggaaggaggaaggaaagaaagaaaagaatgaaaggaaggaaggaagaatgaaaggaagaaaggaaggaaaaaagaaagaaagaaagaaagaaagaaagatatgaagaaagatatgttaactggaatgagctttggtgtttcagatctatctttatatggaacaaataggtagggaattaaatgctatatccataaacacccatcttgattgcagacttttgctgcagatggaccattttcttaaaacacaccaagtaaatttggtaagcattgacctcatttattaagatctgcagagcaaatagctaaatcgacacaaagaaaaggtgaggctaaagaaacaatatgtagatgcgagacaatccaatttgcccaagacaggagaagagggaatgtcctttaaatgacaaaatctctttctttgtttcaaacctactactaggcatagtagaatgtgtgattgatgggacttaaaataatttactagcagtcatgaaaaaagtaagtcatccaaagtatcagaaatgtgtcctacatggtcaagacaacttaaaacatgtaacttgtaacaagatactttctccttgaatcccacaactctctgcctcaaatgaaattctaaactagagatcctacaaggaaacccatggcaagtgaatgccctggcaacaaacagggggactacttgagtgtttacatgtaagcaggtgtgtaaaaggcttcgattgaaccatggcacacttgtaacagggaagaacagtcaacaggggactgcaacatagtctctgctcccaaacttgagtttccgttttcctttggtgatgtttaaataacttgtcttgctcttcttatggccatcaaaagggattactgatctttgtggtctccaaaccttctcttgtataaacaggagtcagtcctagcaaatacttcctgaagaagacataattaaagaaatcttttatcctcgaaggcagaaatgtcaattgaagcatgattaattaatctcctcgctaccatgaaatttaatctgcatttgttttgtagaggagacttttaatgctgttgtggacagaggggtggggcatctgctctttcaaaactacaggttggagtaacagttcttgtcaagtagcactctgggaagaagggcgcagccaagcctaacctctcccccccacaacccccacacccaacctctgactctccagtcccatttgggttacattctcttctggatggttccttaacctcactatataatacatgtttgctcctcactatattcatgggaggcatgcatgtattataaagtggcaaggctactttatagcagatgttttgtttaagatgaggcacgcgtatgatttctggaacatatgacacaaagggagacagatggaaggacaaggggagagaaaatagtaaatctaccactacctacctggcaaaagtttatgagccagcatgtgtaagttgaatgtgtcttgtctgaaatgcttgtgacctgaagtgtttcagagtcacattttcagattgtcttgcattttggaatacgcaaattccaaatgaaatatcttaagatatggggctcaagtccaaacaaaaaattcatcgatgtcttcaagtattcatgtgtgtgtgtgtgtgtgtgtgtgtgtgtgtgtgtgtgtgtgtgtgtnnnnnnnnnnnnnnnnnnnnnnnnnnnnnnnnnnnnnnnnnnnnnnnnnnnnnnnnnnnnnnnnnnnnnnnnnnnnnnnnnnnnnnnnnnnnnnnnnnnnnnnnnnnnnnnnnnnnnnnnnnnnnnnnnnnnnnnnnnnnnnnnnnnnnnnnnnnnnnnnnnnnnnnnnnnnnnnnnnnnnnnnnnnnnnnnnnnnnnnnnnnnnnnnnnnnnnnnnnnnnnnnnnnnnnnnnnnnnnnnnnnnnnnnnnnnnnnnnnnnnnnnnnnnnnnnnnnnnnnnnnnnnnnnnnnnnnnnnnnnnnnnnnnnnnnnnnnnnnnnnnnnnnnnnnnnnnnnnnnnnnnnnnnnnnnnnnnnnnnnnnnnnnnnnnnnnnntgtgtgtgtgtgtgtgtgtgtgttttaagagaagggaatttaacctccatggcaaaatgagcaggggaagctgggggtccagactgaacaggtttaagcaagaagaatttgaacacatcccaaagacatggagttttgggcaaggtgaaagtaaaacaagagaaagagaaggcaagaagagactctgacagccagccgtgcattctgaggggtggggcagagcatgtcactctcttctttgggcaccttgggtatttgcagctggtgagtcagttctggagttcccagtcatggcaaacctctgcacagacagagacatgtctgtatgtgcatgggtggcttgttctcggcagcttgctcattgtgacagaaatgccgtagtgccttactgtctttgctttccattgagccacaggattcaaattctgtagaatgttagctgacttccattcatgcaatgacaagtccaaagccacagtgactatgtttatataatgcagatacatttcaaaacaaagcatgagccatgccttgcctcttgcaaaagtaattgcacagaatcaaaagtcttcgctcagtaagacgctttcattttgtttggtctgtatcccaagttgtgttttgttttagaattctgctcattttcttttcttgcaaaggagctatttaaggccaagtctcaatttcctcaaacatactggttaaaaatgaattattgattagagagaatgaaatgctatcatcctggatatcttgttttcttcctcagttccagctgtgtgcttaccactggtcctttctaatttctgtctgaaaaacaaatgtactgaaggcaggaagggacagagcttgcagccagtgggtgtggaaggaaacctgcaagactgtagatctggtggaatcctttcaagatggcgctgcaacagaaattgctcatggcagtcagaaagtaatctattatgccagaggcttgtatgggtggtggctggtgaaggactaatataacaataagttttaatgagtgaaagtcaagaaggactaaaagaagaaacaaaagcgctacagatgctttggcttaggaactacacagatccatgctgggagttgggaatgttatgagagatatggtgagggaaaaagtcatttctgtttataatcaggataaacttggataacacagagacactccgacactgagtcatgaggcagggcaaggataaccagaactgaccattagaaggaagcaggaagtagcctgaagaaacctcagctttttattttcatttcccttaagtagagaaaatagaccaacagacatgggcattaaagagaacatatggagatgaaataaaaatattcataaatcctaaaactggtccagacacctctagaggaccacatcagtacagtgcttccagtgtggcaagtcagtgctgggccagtatgccccatgcaggatgctgttgtcagtctgagatggtcattagaaagcgggcattttatttgggaatggaaaagtagccaccattaggaatctaggggatatcatttgtatctttttgatgtcacaaacaaagaggaaacatttcccaatgggggagaaattagatcctgatttaagcaaagactcaaggagaagcaatactcttccagaccaacccaaatcaagcaagtcataagagctttgacaaacaaacccagcatgccatctccaagagcctgcattcaaaactttccgtggtccatcacggtagtgaaagcatctacacaggtcgtaaagtcaactagggcctggcaagggaatgcaacaggaagattggatctgggggatgaaggtaggggtggattctaatataataaccctagaaataatattctatagttataatgtaatttgctcattatgttacatatttctaaaggtctttatagacaggagcctttgcaatgttcttttttaagtattatctcatttaattcctggaatcaaagtatttgttttcaaattccaccttctccatctcatactcatggcgatctttggccagttatgtctctgagctgaagttgcatcatctgtgagacaaggctaatcaaagctgtaactttcaagtgccatttcaaggtgaggacagtaaagctcagcatgtggcttccctaaaaccaagagtgcaggccctcacagacagaaaccagaaaaggtgtcacctggctgggcatggtggccctgcacacctgcaatcccagccctcagatgctgaggtggggtgtttgcatgtctgaggccaattacacagagagtgtcagagagaagggggagggaaggaaggtaggaaggaaggaaggaaggaaggaaggaaggaaggaaggaaggaagggaagggaagagaagggaaggggaaacattttgtctaaccagtggcatcccagagccatgtgtttccacctcatcagaggaacaaataaatttcagagggttgttgtgtttagttttgttagtttttgtttgtttgtctttctttttttttccaaaggaaaaatctggcagaaaaatcttccagtgtttgttttgcatctcaaaggcagatccactctgataaccatccagaaagattcagagtttatggttgtgagagatagccaggtctaaaaatataagaagtgggcacagttcataggaggaagatgtgatccagaaacctggacacagccactcgtgccagtgccaagtgcacatgttgtcccttgggtcacatcacacatcccactccataaaacatcaatgttctgaagtacccctggactgactcactgtggagaggcaaagacacgctccttagggtgcctgaaacttctttttaaactactgctgtcactgcatggaacttatgttaatggattgcaggcttccctgccttttaagtcagagagcactgggcacggtagcctttcccggacagctcaagggcatcctcataagcagtactggactgggttgtgcatggtcatcctcccatggtgttttgaagcatccagtaagccaacaacagctagataacgaagagctttctggttgttttctgtgattctattcttttctctgtctcttctcttaccgtgagtgtcatcttgtccctacctaccaatctgtctcttgttctctccaaacccctttaacttgctttttctcatcaactataggagccaaggtttataaagtgggttgtaaaacaagtacaaataacactttaaaagggtgaattttatgatatgtgaattatggcttaataaaactatttttaaagtgcattacagattataaaatcttaggaaaggtgagatagcacattggtctgtttatattgataataaactatcccatctttcatgtaaaaattaagaagcataaatgggctctgataagacttagaatcccctggcctggcagtattcttcagaactagtgtctggtcttcactgtagctttccgtttccatggtttcttctttagctttgttcttaatcagggaagtgaacgtgattttcatgagatgtggtatacgcattcattctttgattaaagcccctctcatctcttacactcatatggcatttgggaatgtgttaggacctaggaaccaacatgaatccccagctgacttgggaacaagtcagtccttgtgtagattttagatgcaactcactaggaattatgagtttttatgttttctgtatgttttcatcatttcttcatgactgcaaatgcagacaggctacagagaagcatgtgggagtccccttagtctatgtttggaaagctgcctgtggcgtggcgggtcttagtcaaaggatactgctttctgttgcattctcagcactttcccacagagaaagtggaacctcagactcaaagtgtaattgctcaagacacggcagcacctggtaatgtattagaagctcaaatccttaggcttcacccagcagctatgaagtcagaagcggccttttaacaagactctggagtgattcataagcacattaaagtttgaaaagtacttatctggataatattgtacatcagcatacccaaagcacatggcacttcatccactgtgataaccatggctcttggggctctcagagaagtgacgcaaaactaaaaggccactgagagctgcacctcactggccaataacagaactgtgccaagggctgccaagcaagtcttcaacattctcctctaatagtcagagaccatggctattctcttaccatggttgtcagtttcagtatctcctctccagtgactcagagcttcattcacatgtgtcttaatggtcagcctgtcagcaacattcaaagctaggcccttttcctttgttgcaaaacttcatccatgttcctgtaaacaccctccagttcaaaatcggctctactcgtcttgacaccatttcgctcatccattcattcccatgatcaatgcttactgaactttgtgccaggtactcctggcacctcctgtatttctcattcactaaccactatgtaaactattgcaaccctcctatgcccataggcttgcttgcttcccaacacttagttaccacttcttacactgtactggaagcattgtttaaatagatgacttctaacctcaaagaactaatactgtaatttaaaaggcaagacttggaattttgacataaatgaagaatgagatcttaaggccgcaaaggaaggatgaatgttttcttgaatccacactgggctgtcctcaagtccaatgtctgctgactcatttcagggtctagacaagttttgttgtcctcctggacttcagttttttcaatacttaaaataataagaataataataagtgtccaaaattctatctagtctttgataattcagattccccaaggatggcatctcaaacccatccccatacagaaacattaaggaaggtattcactagagatttgaactaggaggctgtatatgatcatgattgacagttctggttttgataccacacagatctaaagctaagacctctttcagccttgacaagtgactttatctctttggtcctcagtctcatcatccggaaagtggggatgaggacagcatctgctttgtgggatatagtgaaatggagcaatttagaagaagctcttagcttaggacctcacataaggaatatgcttaaagagaaaatggtggtggtagtgatatcagtaattttcaaggtcccagtgaaacatacaagtttttctagtaaggacaacttcatccctggtatgggggacctaaccagatttgtgagattagttacaagactactggccagctgctatcaaagaaggaatgataagaggtcggaaagttgagacttatgttaagttggtggaaactggtactaacagtgctggatagagaaggggacttcattggacagcagaagctgcattgagtgccacagtactgtggacagtgtctctggcatcttcatgccggtgaggaaggaaagagacactgaaggtgcctctgagaaatgttgacacctgaaagacagagccatcctataaaactcttcttcaagatccagcaccatgggttggggagatggcttagttggtaaagtgcttgctgcgcaatcatgagaacctgagtccaatattcagaactccctccctcctgccacccacacacacacacacacccaaagcagggcacaatgctacccttgtaactgagatgttagagaggcagagagaggcaaatccccggaggccagccaggctgagctcatctgtgagctctaggccagcaagaagacatccgaagaaaacaatgtggatagctcctgagagacaacatgcagggatgtcctctgctcggcctcacatgctcacacatacacacaccacataaacatgcacatatacacactcatggatcatctcgagagattctttttacacacacacagtatttaaaccctaattaaactgggggaaacatttatagcgctcctgtgcagggaagatactcgaggctctaaggtcacgtcctatctgagagttctgactcagacagtccaggagaaatgtattgagagttgctaagcatgtcttgtcactgtcggtctagctatagttgaaactctttttttaagagcaaggatcagccgaatggtgttgcttggcacgcttcgaggcttgggcatttgaggctggggcatttgaggctggggaatcacctctgcagcttcttacattgcctcaggcctgcacccaaacaaagaaaaggtggggtgacaacagaggtccctggtgaggtggacttcagcaagatgcctcagcaatccacacaggatacgtgcccatcatcgggatcaggcatgatctcactatctgtaatcctagtaatttattagaagaaaagaagagatggaagatggattcaacccttgagagcagacatgtggccatttcccctagaccataaccagatggagaagtaagacaatgaggctggtaaagagcgtggtttctttgagacaatcgcaggaagttttctccatccctttcttcctcccacctcttctcagaggttcagcaagtgattactgagtgttgagtgcatcgccaatcaccgtatgtacttaatggtttccaacgtcctgacaatctactcagaaagtattgccatatgggaagaagatgtggggacctggatggggccatcgatgataagcagattgcccatgacgtaacagcaggcagcccagggaaaaggaagtatgtttcagggactcacctgaggaagtccttcccacaaggcctttgctgccatgcaaccagcaattaggaatagtgagtgaggctccttccctctagctcttctctgtctcccactgtcccaccccaatgttcccaggggtatgtcctgaaacggacgtgaatggtcttcctggaagtgaggggctctttgctatttggtggctatcttggttattttccccatcactgtgataaaatattcctgacaaaagcaacttaaggcagaaagtccatcctggctcacaggtaagagtacagctcatcactcagaggaggcaaggaagcaggactcaaagcccctgtgttcaggccacactgacaatccaaaagcagaaagtgacggagcatgctagtgttcaacttactctccattttacacatgaaggttcccacctgacgaatggcactgtccacgaataagactgctctccccacggcagttaatgtgaccaggacaatcccatgcaggcatgccccgaagattctagatcgttaaattgagaattaacaggagccactcctttggctttccctccatgttcctggttgacccccacctttttccttaacactgttactgagttcactaacctgccaacattcacatcagcagaaactgagatctttttctgctgcttcactactagagtgggtagcaagaagcactaactgagaaaatgtcaggatagcaatgtgtagacgggtgtttagcaaggagctgggagatgagtcctgatgggtagcattcactcatttctgggatataaatattcccagcagagttgattttaaattactaacaacgttaatgggcctgtaaaattcctaaatatttaacagtcaaaagctactatcccggggacattaggaaccccctgggaaatacagaaatttgttttcctgtactatggtatctaggacacgggaggagtcacccaaattctctctcagagtgcacatagggtaataatattctggaacatctaagacttcctatgagctgaacttcatgaccctggggccagcactggctttatttacaggttccaggaggtagctggtttggtagaaggtagatttttctttcttatatgtcactttttaaaaaatattttgatgtcttgagataacagtctaactatgcaacctaggctggcatcaaacatttggtaatcctccaacctcagcttcctgagtgctgggattccaggcttgcaacatcacacctggctttcattctgtccttacttaccaacaggggatatttttagctttacattctgaaaagatactagctagtccacagaatttgggggtgatgggtatagcaaggcaaggctaacattagcaacgttctggaccatcaggaaatctccatggcaccagtactggatggcagagtccgaagtagatatcatataacagggtctgccccagagtagcctctgccagtagtctggttacttctgcagacactgaagcaaagatggaagacccacggagaattcacaggttgtcacattgtttttaatcccaaaatgcaaaggaagttctacacttattatttatttgtgggtgtgtgtttgggggaaggtatgcatttcacagtagccatgcacaattcaaaggacataaagcaagttccaggccaacctaggcagcatagtaagagccgccacatgaacagaaggaagggatgggggagagaaggggacagaaaaggaagaagaaattctatacaaaacccatttgccctgggctgtcttgtgaaggcatgactgggatctcagaaagtgtgtgatctgtcggggatatgggtggctcctgtacccacctcctacccaggcaggaaagttggggtttgagctttgtactagggtgaggagattcataacacagacattccacaaatagagaagtagggggtgagcatcattcatgaaatatggtgtcaattaacttcagccctcctttgtcttaccagaaaagttggccctagaatctgactttgctgttctttctgcaaagacagtgccatcttccaggggaggaatgtgttgtacattctgcccattgtttccctgtcgtacatcactgtcaacagtctaacagtgggtagtaaacacagccatgccttccagtcagacagagctacttgcctagcctctgtgtgcctctgtttcagcatctacaaaatagggcaatactcataaccctctgcttcatctggttgtgatgaagattctagaaaatctaggtaaagaagcttgtatcccatgggaatgcaaagcttgtagaaacttttcatgaagagctgtgtggcagtggaggaaaaggaattctagactcatgccactttctctttcctcaagatcacggactagtgatatggcacagccgacaaaggtgtttgtcacagagcctcaaaacctgagttctatcccaggaacccacatgctggaaggaaagaactgactcccacaattctgcaagctgtcctttgacttgtgcatgggtactatgaaatgcatgccctcccccaaatacacacccacaaataaataaataagaactgtggtagaatggtggtagtgatggtggtggtggtggtggtggtgattcctgatagcatgattgctgtgacagtttaaggtcttgtgacagtctgggaatacagctaaatggtagtatgtgagcagtgaatgctctgatttcaacccacaccactacaagtgaaataataatgctgataatagtgtaacctggctacgtaccagctgactagtgataattgatcagtcaatgatagaatgatttatgtcaatacacagcatagcttaaatgagaatgtaattgggttctttactacttccagcttggttaccttctcagaaaccagtatgtgccctgactagaattttatgagaccacaacgttttttattttttacatttgtatcatataaagtgtatcatttatacacataaaacaccttccttgtctcattggcttcacaccctggtcttttgaagcaatcagaacacccccacaagggaggtctagcacactgtccgcttgacaaaagctcacttcagcagctaagtgactgtctaggtcacacagcaaattagtaaaggactgagaccaaatccaaggacttctggctttgtgtagtgagtccctcacaggacttcatctgtacttcattgctttgttcctgtttttagttaggagccgatcactcattccctttccctactcaccactatgctaaataagttctgctgatacgaggatgaattaaataggtgcttgcccactaaccaaaataatttaggaaaacattccaccccatccccagggaactcaacagaaaatggttttgcccattatgtgaccctcagtatttcaaaaactgtattttcaagcagaatagccaaattttaaaggaaacaatgtttctcactagagccgtaccttgtaaaattaaaaataataacaaactattaaaatcattaaagcaaaatttcaaaagcttgacttttttaacttgttgaattttttcttcttttcttttctttttttttttcaaattaactatattgctagcaaggctggtcagttgccaaaaaaaatctaaagttgatgccaacgtgtattattttcaacacacaaaattttttaaaagctcttaaatgtctttgagttgaggtatccttagacaactcaccctctggctttcctttcaccccagcctccatgagaagaagatataaaacattgtgggctccagaatgttctgtccttggaagatctccatttggtgttttgggccaaaagtcccattaattcccctatgactaaggcactttggggtcagcagaacttggggtctatggggatttcagaagagggacaagcttgggctgcatggtccagaaacttggggtaaagccagattgctctacaaggattttaaaaggagtcaactcagggcagcctttccctaataattgtcctgaaattaacaccatcattctgttacacccaataatgacagagcctcccactttgtaagaggtaagaaagaaccaatcgatttgcaaacggtttttataaatccttatgaataataaaggggtagtatttcctccttcccagtgatacagaagggcacaagggttaaaaatgtctactaggtcacatggaaggcaaaggtaggactttcaaagtactctgctctcctgacatctctcatctctgcctctgctgcccccaccctcttcccctgagtgtggtgagactagccctgaagactaggagacacaggaatcttcaattcttgttctaaacatattttctaattaccacctacatacccagcactatattaggcaatgaggaatgttaatgaagaattctgggtttggcctcgactttgacttgggggaaaaaaatgtctcttttttccaatgatctctttcttgaacagctaaaaattagcaggtcctttctgggactattggatggagggataaatactttttaaaaaatgtaactatattcataatagttttgaatctcatagattccgtttaagataatccctgtcaaagtgataattcaaagtgtctgttcaaaaaatctgagtcacctcgtgtgcactgtatttttgttttgtttttggaacacaatgaattgcctttatttctgtaggcagccacatttcggcatttggtggggaaagaggcaacaagactagacccacagatctgaaaatgttgtgacacagagttcctccatgtccgggggggggggggggtgttttgaggagcagtgacactgaagtcagtatctcctgtttcagttgtctgtcaggctccacatcagacccgatgggtggccagggtgatacaagagggtgtcattggtgtcagggtgacattgaagaggttcaatgtgtaaaagtgatttggggaaaggaatcaactcaaccttgttctcagcgtggcctttatccaggcattatcaccaaagaccctgagagctggcaggtctgagccaccacaaagactagcaccggcctttctattcaaatgtcttgaggttcttgtttataattagctgtagattcggtgttctgagtagggcagtgagaactgcgttgtccaggatataaaactaggaggagggtgtaagaggaggcaagatggaaaacggccttctaacaaaatgtcttcaatgctgtgtgttacattaaaagtgacatactttcccagtatagactttggaagtaaagcttgacataatgggacattcacataaaaagagttaacataaataaacgcagcctgatacaagtttagtgggcatacactggtacccctcagcctcaagtacatgaccagttctcagatccatgcagatttttcctctttaaactccaagcatcattttagtgactggatttcatatgtgcatttaatttggttacattttcgtcttcttttacttagaaaattagatcaatatcttctccctaaatgacctagaaaggggggtggggagaaaatggaacaaattatattccaatgagttgtcaaagattgctacacatccacctagattccactcaatttgagaggctaagtgttggacacacccactccatgaagcaagagtgtctggtaattgtatctcagatttcacacagttgaaagatggtccagtccattagctctactgagtcagagcacatgtactggcttgccactctctaaccacccttgtgaccaaagaaagactttcaattgctcatcacctttaaaaaaaaaaaaaaaaaaaaaaaaaaaaaaaaaaacttcttcatcaatgattttatacagagctcagaggatcaaggatgcatcagtggttctcaagtagcttgtgaaactaatggccaaagtcaatatggcagtgacaaagggatggggaataataaatgcaggaccagcagattattgtaagtgaacaaaatctccaaaaggatcagtcaaggtaaattaatacagtcccaaacatttagttttgcaagaaaatcaaaaaataaacatttgatttgttaaacaatttaaataagttgtcatagttattatttcatttattcctcactgccatcagcaaggtgaatatttacatgtcccagtcaggggtcgcttgtctccctttacttcttgcctcctcttcctcccttcctcttcctccttctctgtttcctttcatctcctccttattgacttttgctcccaaaagatttcacctcaacgatactggtctcttgtttaatcgaagctgatttccagtcccaataaagcagaggtgccacttccatggcttctcaattaaaatccatcacaggaacatccccagcagagtctttgagggacttccaagctcccttcctaaatttggtaaggcctcccatgtctacattgctctcagcattgcagtcaagttcccatcgcagctccttttttctctgagtacttccagcctgtttccacagtcctccccccaaaaaaacagcatggccagatccagcccagaaatatttcatgttccacataccaatttctgtcttgtttttgtgatacatcactaaccaaaaccaacatgggagctttatctcatactttacagtaccatcaagggaggccagggtaggagctcaaggcagcagcaacctgtaggcagcaataaactaaagcagagaccatggggagatacttctcgttggttacttttgggatcacattcaactgtttttctcgtacaacccagaaccactagttcaggggtggcatcactattgggccctctctctatcaattaccagtcaagaaaatgccatacagatatgcccagagaccaatctcatgatagaaatttttcagttgagatttcctattcacacctgtgtagtgatattttgtttataatataacagataaagcttgcctcaagatcagagtgcaaagctagccacactagtcagccatccgggctaaggagtggtggcacacacctttaatcccagcagccacactagttagccatggaggctagatggtggtggtgcacgcctttaatcccagcactagagaggaatataatgtgggtggagacaggagtacaatatattcagtctgcagtcacgctgaggacaggatccccccagccttggtagaggtaagaactccctagtagctggctgctttgcttttctgatcttcagtttgaaccccaatatctgtctcttggtttttattatttgtgctacatctggcgcccaaaacacatgtgtctagtttgtgtcaagttggcaaaaactaaacagcacatgaccacaaacacacacgaccaaattaaaaaaaaaaaaaagaaaaaaaaaaactctccaaatatatactcaaaataccaaaaatacaaaataaataaacaatataaagctgtcaggggaaatcaccactgaaaaaaggcaaacacatcagaataatactagatgccttatccacaaccctaaatgctggataagcctgaataagataagtgagtaactgacagccaagacaatgacatacccatcaaagtttcttttaaaattgaaggagacatagggacatttcaaggaaagcacaaactaaggcagttcattaccagcaagtcagtactgtagaagatgcctaaatgaatactgtatacagaggaggaagagatggcctcagacaataaaggaacagacaagtaaagaagatttaagaaaacagtatatcagcaaacacatggaaaggagaatatagaaaataaaattggctttattttaagaaatcaacatttgcttaatattataaaatcacttttcatggagtcttttttgtttgttttttgttgctgttgattttggagacaaggtttctctgtgtagccctggcttcctggaactcactctgtagaccaggctggcctcgaactcacatagttctgtctgcctctgtctcccatgtgttgggattaaaggtgtgtgccaccactgcccaaccagaaaatcaattttattcataccattcagggatttttaaattatatcatctatagagaaaagacacattgctcaacaagcattcataaaattaggcttttggggtgtgtgtgtgtgtgtgtgtgtgtgtgtgtgtgtgtgtgttcttccttctgaaaaactttacatagagggaattttcttactatgagaaaggatagataaaagaagactctatatttatattaaacaagtaattaagtaaataaataaataccatctttgtggcaacatattggatctctctatagtgtatatatttcatttagtctccagtgaacttagtggggaaaacagagcccatctcatctgttacataatctgggatgtcaagagtctagaattataaacacctacttcaaacttcagactaacaggtttctgaccctaaaagtaggaagaattcccccaacccaggatgttgccaaagctctgctcagatagataattcagtcttgggagccaaaataagtatgagtttttcctagggtatctagagaccagagactagacttgagcacaatctacctgtaaacatcatatgcgtgtgctttttaggacacttaagaagaatagccttttgccagcatgaactctcttactaaagctctacagggagtggtagttataggtggtcaaagcaggagttcaaatctagctccagttggggcaagaagatggtatgctattaatgggaagttgatcacaatgcagactgggtgtatgccagaggcttaggttctcatcatagtccgcaggtcctcaaacagtggaaaaagcattggggatgtctgtcagttccaagaatgcttgtctagcacatacaaggtcctgagttaggtccccaacaatgcacaaattaagtgttgtcgcacaggcctgtgatctcagtgcctggaaggtgaaggcagagggatcagaaattcaaggtcatctttggctgtgtagggggtttgaggctagcctaggaatcatcagaccttatttctaaaggaatgaataggcatacaatagcataagcgaattgattccatcagaaatcactcagcaaatggtatgagttacgtaccgttactagcaattggagtagcaacactgaaaggcaacatcctaacttgaaagatccctgagagtagtcatggaaacagggccatcaacatcaacaaaaaataatcacttcacagacttttaactgaaggcaaagcccttgagaagtaattgagacaaagaaattaccatcaaagaggtagcatatgtttgatgatccactatgtttgaggatggccagttaattggatggaaagttataaattctttaaattcaaacaacaatgcctttgaaatctctgacagatgttgtcaagattcctacgaacagatgtctataaaacacaaaaaaaaaaacaacctactgaatagttctcaatggtaccagttgcttttttcatcaacttcatgtaagctaaagttctctgggaagaggagccccatgtgaaaaacgcccccatgcagattgtctacaggcaagcatgtaggggactttcttcattaaagactgatgcaggagggcccagtgtattgtggcttgtgccactcctaggaagatagacggtcctggtgtatatagggaagcaaactgagtaagccagggaacaagacacgaagcaacaatcctccatgcctctgtttcggtttctgcctctgtttcctgcctgactttcctccatgatgacatttttccatgatgaccaactattgcctggaagtatgagatgaagtaaacccttttgtccccaagttgcttttggtcatagtctttctcatggaaaaagaaactaaagatacgtgctctttccattggttatttactggatttacagatcaataaatgctgacagtagatctgtggggaacatgcatctttgccaatggttatgttttaaagcctacacttaagggagaatttcacatactaaataatgtgtttcaaagtccatttgtgtactagggataaacactgatccactaccagagaccccatagattgcctagacctccaaactgactttctcattcaggaggtctgaaacagtcctgtgctggagcccactccacatagagggatactctctcaacctagacacacaggagagggtctaggccctgctccaaatgatatgacagactttgaagatccccatggaaggcctcaccctctttgcggagcagataggggttgggataggagatgggggagagggggacctggaactgacatgtaaaagaagcttgtttctaatttaaaactggtctaattacaatcataaaaataaaaaatatattttttaaaaaagaatgtgcttcaaaaaaccctgttcaccagtgaaataacactagatggagaggtttatcttttcatagaaaattcactacttacttcatttactttttatattttagattataatcataccatatcctctatccttttccttcctccagactctctcatataccattcgtcattttttcaaatttgtggcctcttttatcattagtttttacatacatatatgtaaacgtgtgaacatatatactcctaaatacagccacctgagtctgtatgatgttacttgtttgttttcagagctgaatgcttggtattggataaccaaatggtgtgttcttctctgagaaagatagacactatttcttctgctctagcgttctattattgtcattagtggctctgtatagttaaggcttcctggggtttgctcagtccactctagcatgtctattgttatctttgttcagcaaaatcttagccaaattggtgagactttatgcatgtgggggcgtaaatgatataacattttgcaaatgacttttactaattgaaagtgacatttcatttaagtttacttaaaatttaaaaaatgaatttcgaaagtcaaaaaaaaacctgttcacttatcataatttgcatatatagtattatatcagtactaggcacaaactgcaaagaccatgaggctacattcaagaaagaagaaaaggaaaatctcattgaagatgtctgggccctcatagtattccaactgtagaatgattttaacaatgaatggatgatggttgggagtttcttagcattgtgtctcatctatgtggttcattgaattctgtttcacacttcccttctctaacaagaattattttctgtggcaagttaagtttatgagggggattaaagacctaaaccagtgtgtagtggcatatggacaccatactgaggatgctgtgtctccttaaggcctgttttcttatcacttccactgagtggtgatagtttggtgctggtaaaagtccgcttctagaaagacatgctcatgccttgaaaaatgaagtttaagtagatttaaggtgacacctaaatcttgtttacttgactcatgcaaaaaaagacctgcagaaacacacccccacctcccaccccccacccccacccacacccacccccggtttgggcctaaggagatggcttacttatgcagtccttgctacataaacatgaggactgctgttcagatccacaacagaaggtaaaaattcaggggtggcaatctactcctggaatcccagcacttcttcctgtcctggcaggacaacaggatccctggtgcttggtggccagtcagtctagcaaacgggtgagctccaggttcagagagaggccctatctggaaacctaatgtggagagagattaaggaagtcaacaaactcaggcctccgtgtgcacgtcactcacacatggatggacacacacacacacacacacacacacacacacacacacacacacacacaccacatatacacatacattttttaaaaatttaaatcacatattttaactcctatccaacaaagataggaaacatgtgtgcttcagtctcaactctgccagaagaaaactaccctgccttcttgcagtcctagtttatctacttatgaactgaggtttgaatgttttaaacatacaatcctgtgtaacttgggcttgtacaacacagccaagtcattcagtattaccatgacttgattccttcatttgtaaaacaaagatatagtttcaacttcaaaagatgttagaaaattcaactttacaaattattgggtaaatattcacacatacacacatattatgagagaaaaagagaatgataggaattattctgccatatataattcactcaatgcaattagcttccatataaacatgttactattatcataattaggctgtgatttttttcccccttataagatgggaactaaaaagtcgagcccaagatagtgtatcaaaagttacaaaatggttaccagttaaatcaacattttattagcttctgatgaccatgtatttctgggctaagccagatgtctcccccacccccacccccaccccaaacacacagggagagagacagacagacagagactaagaaaaatacaccaaactgttgggtatttactttgcccataaccgaaccatttcaactatcccatctcaaagacagataagtcatttaatagtgatagtcaagcacttttctacaccacagtttattttattctagttgtatgcagccatgctaatgtgtcagtcggggctctagggaaacagagctaatatattgaatatatattacaaggggtatttactagattgacttacacagtgtggactgagtccttcaacagtggctctcagcaacctagagtgctcagccatcataatctgtcacagaaggcctggaaggctcctggggagctttacatcacattagaagactggagtcagcaaacaatgtcagcatcagtaacagagtagatgcacttgccaacaagtagctagggcaggcaggccaaagcagcactgttttcccctcagaaatccttatgtgtgggccactatcagaaagtgcttcccactctgaagaaagcgcttccccactcagtgaatccttccagaaaattccctcacagacctgcccaaaggtatggcttttgattccagatccaatgaagttgacattgaaggttacccattgcagctggaaagacacctaatcaagatagatttaaactaatttccattgtagccttggaggtgtcatagtaatgaatatggatgaggtggaatgccaccatagtcttatttgggaatcatcagaccaagtggtttccactgtccttcctctctaacccaggaattctgcactagaattccactgattcctgacaccctcaaagtataggaagttcaataaacagtaacagaggtctacattggcatttgctcggagtttttattgaaggtcaaagctggaactttctgtttcataccactttcacggcccagcactttctcctggttgattccttcttccatgctcacttacactggttcttcctggattcttcattttcagtttgctcaaataaatgactttcttgcctttccaaaccatggcgacctccctcaatagaagcttggtttttcagaagctcctgaactttttaagattgtgactgccaaccaccctgtgccctctccattttaattacagcttccattccaaaaaaggggtgagagaaatggatgttaacccttataaccatgtttcaagaagcccgacttcacgccttcagtctctgtgaaataaagggtcacatatcccatggtcgctcaaaggaaagccttggagccatgtcaccggggacagtccttgcaaaacttgtctagtcactttgacctacagcaaaggagtgaagagtaaccaggacagaagatccagggagcagctgaacaagccatgaaagcagtatagccaccgagtaagcgggactgtgttcgagctgtggactacagagcaatccgggtaaagagagcctcagaggtttagtcttttatcatcacggcagcatgcatggcactggagcagtgactgaaagacacaccctgatttgcaactgggggcggggctgatgaaaccttaaagcccatcccagtgacacacttcctccaaaagaacacacctactccaacaaggccacacttcctaatcctcctcaaacagacactacttcctggtgtccaagcattcaagtggatgagcctatggggggagggggatatccttttttttttttaacttactttttatttattctttgtgtcttccaatataaagtctccagatctcacccatctccccctccaaaataaaataaaatgaaatttaagaggagaaagaaaaaaaaaaaaaaacaaaggaaaatctcatcatggaagctgcagtgtgacaaggtgagtcacagtaaacccctttatccatacattttgcatgtagaggtcatcacaaagaatcattggtctgggatactccctgagcctagacacaagggggtgagcctaggccctatcccaaaggatatgacagactctgaagacctcctgtggaaggcctcacccccactggggagcagaaagagtacaagataggtagggtgttagttgggggggggggcagggaaggaggagagggagagggacctgggattgacatgtaaaataatcttctttctaattaaaattaaaaaattgtaaaaaagcatcattggtctgatttgaggcccctggtctctgccacaccttgggtgctgaacccccacagggactcttcctgcacactctgttgctgccctgtgtcatggagatcttgcagccctaggtactcaggactgtcccccaccctcatgctccaggaaatcacagatggagtgcatgttggggtgggtcaacacataaccccggttctgggcctgggtagttgcagggttggtcagctcctcccctgtcttcaccaaggtgagctctccagcatagccctggctagttcatcccttgtatcaatgagcaaagggcattcttattaaacccccacaaggaacttgaagacaggaattgctgcagaagctatggaggagtgtcacttgctcctcatggcttgctcagcctactttcttatgtatccccaggaccatctacccaggagtggcaccacacacaattgtctgggcttccacacacaccacaggcttgcccacgggccagtctgttgggtccactttctctgttgaggttccctcttctaaaagcttgtgtcaagttgatataacactagccagggcaaattttgtttagcgttttaataaataacttaagaaacaaattttgtaacgtttgccaagaacagaaagataatctaggcagtgaaatacttagcaaaatgataaagcaaaacatctggcctgtgtttaagactcttgagagacccaaataaatgcttgcttttagagctaagcgaacttgagttggaatcctgtcactacttagaggcattaatcaggcaaataattcttgcctctgtgcctctatttcttgacttttgagttggaaaccctaagagagactgcttcataggttcaaaagattacatgatattatgcaagacatccaccctcagtactacgcctacacatggcaaataacagacacatgccagccaacaagaatgttagtgatattggcagtaaggtggtcgtagtgacaatggtggtgatgataatgacagtgccgatagagataaaaatggtatttatcatgggtattggtgatgggagtgggagaatgatcaatgttattattccaacaaaaatactccctcccagacttatgtgtttgagggcctggttccagctgatgcattgcaccattttggacggttctggaaatgttagcaggtaagacctagttggaagaattgatccctggggtgtggtcctctttttcttatcccttttgtgttactgattctgtttcctgtccaccattagatgctcctctgccctgtgttcctacactaagatattcttctgaaacccatggaggtaaaccaccatgacctgagctctctggaaccgagagctgaaataaactcttcccccagtgagtaatttgtactttggtactttggccacaatgatggaaggctaatataatcataacaactgtggtgatgctggtggtggtgatgagaatggtgacggtggtcataagatgatgatgctgacgtactctcagccataatgtgatgcatgtctgagtagccttgcagaaccactctcttcttgacagagccccaatcacatttccacctgaatctaagaaatagctttgatgaacactctggcttttggcatgaaactaatggcttcaaatcccaaacctctcaatttcctgcacaaatacccaacatagtacctgtaattccatcttgtgtttttatgtgcagatttctaactctcctgctagatttctagctcctagaaagtggtatctggtattcctgggacctactgcaacatcaacacagtcacttaagtttttagagactgtggtcaaaggaagaatgaataataaataaatagggcatgaaacaattggcttataaaaatgcagtatacgtgagatcattgtttgtgaattttaagaaaaatttagagctgtggaaggtcatatttacaatagggctgtgtggtttcaacacattcacaaaataatagaacactgagcctgagtcctacagcctgcatcaaagaatctgcaggacagtcagatcaagaactgcttttctttttaatgaatgtatgaaaccaagtgctaattcaagataagaactacatacacatgagcctccaaaagttgaaaaatattcagtggtagttgacctaagtttttttccttgttttcatctactacatcaaacgaggaaggtcactcactcatgggctcaagacttggatatgagcacacacacaaataatcatctttatcctaaggtagcttatattatcctgaaagacagaggtcagggacaggtcacaaagtgtctcattgttttacttccaatgtatcaccgaggtacagttttgccaaaagttaagtattaactactgaaaagaatgaaattatgagtcagggatgtaacagtggaaaaacacttccctaacaagtttgggaccccaagctcagtcctcagtacagaaagaaaagggaaggcaagaaggagagaaagaaggaggacaaaatttgaaataatacacagatcaggctcaaatttctcataatcagtagttgacaaaaattatcaaatcactctaatcatcagtaaacacactgtcaatttctgtacatataggaagtcactgtttacaggcctgcaatggtccacgactatgtcctgagactactaataagtaatagaaaaagttagctcttctaagggagatgacaacagaaaaatgggacaagatgatggtaaaggaacaaattatttaaagccaagcctacttggttggtatgttttctccattcctaccccctcgataaaacactagttttctcttcctccaccatagtttactttcttagaaatatgcctcatatttggttcctcttctctaggccagaatcatttcacagcctagaaatgggaaagagtttttgcagtttgccaacttctgtcgtcatgtttacatcctgcagtgtgggctagctcatcatctctccctcattcgactgaaagtttcaccacactccctttaaacccccacaacacccatgaaaagctttaagcggggtaagtccttagtgattgcttgctgaactagtgaaagaatgacgtaatgaatgaacaaactattttctactcagtgtcccctgaattactgagatgtgctatgtttgaattcatttgatagcaaacgttaatgcttgccttagagtcaagctgctggaatcacttaatctctctgtatttggtccacatgtgaaattccaaccaacatcaaatgaaagtttgattaaacagacccgggacagcatgtgggatggctgtcagttccccagaggcaagatgtgggtctggaaaccagaaaatgtcatactacagagttgagagctctcaaaaggagcctatgcctcgcttttgcccaaagaagaacaaggtgtccttcacgcccccaaaacaaacagctaagttcagagacccatcagcaccggcctcaagccttccccttgtatctatctgttctttgtgtcccgagcccccgctctccatccgttactaggctgattcctcatcgtcggggatgtggcaatggagaatgtggtgctattgcaaaaatatttacaagctgagaaggcaaaaatgacagagaagtttccctgtctgggctcattctagcttctcagaagccgctttgctctccaagctagtttcctggagtagggaaggttcctgggattcttcaagcagccgcagttatctggttagccatcaggaggctcctggtattgccccagctgggattccttccaaaccacgtctgcaccacctgtaacccttcactccacatgcttgccagaagaccgtcccaagcctgggggaatgtggggagctgccattccacaaagaaccaccagccaactttggctgaagcagggcaaccttgtacattgcaaaggagttggggcttccagctaagggcacctggccagccctggtatgcaaatctgggatttgtgcccacggaacctgcctcaacttgcccaggagagagcaagtccaggggaagatgggaaaggttctcattccccacctccttccagctccagcctgctccagccagctccaaccagcctcagccagctccagcttgctctagccagctccaaccagctccaggcacctttgaagttctgggccaggaggcatggccagtacaagtctgtggatgtttgtttgtttgtttggagttgctctgtttttcagtaaacctcagcaattcagggcctttcttggttgttagaaagcacaggctttggaaaccgatgaagtccagttcaaatcctggccatgcactgcgtttataaacctaaagacgttattcgaattctcagaacctttgtgttcttgtctgaaatttttaataaaccctaacccagagactccaaacctcagtgctattgaaatcttagaaaaaaatattagtttaggggtagttgggtccctgcccaatagataccaatagaactctcatgcacccacttgtgacagctaaaactggtttcagacatgggcaactatccccaaagggagggggctaaattacacccagctgagaagcagctacctagattaatcttgtaggtttatgttgtgcatgcattattgcaaatccagagtctgctccctatgagaacatggcaggaaagcactttgggattcttaattggcattgcatattctctggctgtatgcctctccgcccctcagcatccatctggacacactggtggccactttcaggagcacccaagtctccctggcataacaggacagtgagtctgagcacaaagcaagatggaaacttatcccttggaagtagacctcagacaacactaacccagctttgttgtctcttagaaaagcctggggtgtatcccacacttctcaggagtctccagtgagatcagattccatgcttccctgtctcccccaacacatattccctaggcttatttcccaaactcttcttacaacttcctctgtcttttatgttttttgaaattgtaaactaagaaataaaaattatacctcttatttctataaatatcttcctttatagaaataataataagtataataataatataatataacattaacttatcagacttatttcttagctggttgtgggatttcaaacttggattgttttgcttttgtcttttttaattctcacaataagttaaaataactgctctgtactggggactgctaaaataaaggtctccatagaagtaggtcagagtctatgattcttacttctcaactggacttagacctcatctatcccccctttacctccactggaaacacatacacatgcacacggttgtcagttgctgatttacaggaatgaagataacagggcagcctctttgaagcattcattattgcagaggcaaaaaaaaaaaaaaaaaaaaaaaaaaaaaaaaaaaaaaaaaaaaaaaaaaggtctttgttaatgatctggccttttttttttttttttctgaatccctaaaatgagctgggcattgagggcacatttaaagtgatgacatggatccttacctcaagctctccactctcaggagattaattagcaaacccaagattacagaagagtagcagatggggataagacctacttccactggggtggggggatcccagagaccacacggaggaagtcaggcttgagtagtctgaatttaggacctgttggcatcaatgacacccagatgcagataaatagaaggatgggtactaaacagcacagtgttttgggagcccacaggcagtataggatgactctaaggcaggttgaatgtgtgtctttgggaatcaggagggctagctaagtggtgggagaagaatctgtagaggaaaacagactgagcaggaagcctctgccttctgtaccattttaagaagttcaatgtatatccttagctgataatgtggggagacatctgagttgttcatctttctgttgcagtgactggtcaagataaaaggtcttttttggctcagggtttcagaggttttagttcatggctgcttggctgtgttgcatctggccatgtggaatgctggaatgatacagtgtggagcagtgcagagatgctcacctcacagcaaccagaaagcaaagagaagcagaatgagaggagccagggttccaaaagtgcccttactgacctaacttcccctagggcccacttgctgaaggttccattgcctcctcaacagactcagagagacattaacaaatactaccaggttctactgtgtagaatctatagccttaggtcccaaagtcatagcaagagagaagccagttgattgacatcagacatgatctggtcagtgtgctcttttgagaaagctgtgtgacaatgtgtgtgtacgagagttatccttgtgctgattcaaccatgccaccagcaaggaccaagcatcatctagttgtgcagccagctcatacatcaggagcagcctgtttgaccctggaaaataacatttataaggtaggaagtccctctgagactaagaatcttgacaaatgccagatgtgctgtctgaaaagctgtagatactcacacaatactacatctcttatgtctggcaggaaggaggcatgacttgtaattctacttcatggagtctctcactaaggatcagccaaaatgtctccttaagaaaggagataagtaggtcttttaccaggaccacctgcacctgtcactcaaacgtcccaacccttgaataacctgttaatattggtttatttaacaagcaggcacattctacaactgcataattagtcccagttctccttcagtcattacatcatctacaccccacgctggaacctgaaaggatatgaatgctgtctttttctttctggtttatgagatgctttctccttgccaacccgtgaaaatataagccatgacttgaggagggtaatctaacatcacagaggattccctccaactcaacaggtgattgcttgtgatgaggtttaggagttgcttcactggagaccatgccagatagagtgttaagacacccttaggaagaaatcatagatccaccaaaagcccaggctgaaaggaatttccaaggcccaagacaccaaccagttcacttggcagctcagcatccctccttagaggtcagaaaagatagtatggaaccagaaatgaatgtctgacatccatgctgggcatgttccactgtaccacacaaggtcttgccacccatggccatttagaaattgtctattttttgaaaaagcttgcctggagttggtggcccgggacattgatgatatttgctagccaacagtttggagaatccaaaagaatgaatgccctttcctgtgaatgcagccatgccttctgatgcctcacccctaccagtccagtcaaccgatgtggaatttatcagaaaactcaagatgctattttcccaaaaccttccggaatacagtgaaataattaggaactaagttagaagctaattcctcggtctcctgactttcttcagaacagacttcctgctttcttaaagtctccatgtgtgctaatttgctggcggagaattctcaaagaagaaatgttggatttcaacattcaagcgttaacccatactgatgtcagtataccgtataatatcctctgccgccatttatcactgggcaagacagtctccttcagctcaaacctccctagtgtcatctctcatgctaaacatgaacacaaactcagctccagtaaggtggtgctctaaatacgtgtcattccttgtgggcctgcacagaatgaggggtcattctctttcacgtgcaaaagtggtaaggatgttttaatgtcatgttgattttgacagtatttcagagaagagcattcacctcatgaaagccgatgcttttccatattgaactctcttaatgggtcaatggtgccaggatgcgttcccgcacacgctcacacacggagctaagattttcatggtgggatttttaaattctgacgtgaaagcttgggtaggaaagcttgtcaaagctgtgttgaggtgagttaagcttgcttttgctgtagttcgtgcctcaaggcttttctgctccaaagcctcttgagtttccatgtggtttccttaccttaggataggataaaatagaaagagcagctcagccactagacaggttacagaatggatttacacaaatggtaggttcaagaaacggagctttctccaaagatgggagaagatagaatggagaactaaatgctagttacttctaatcaggataaatgttacttagtgccaggaaagagagtgttgtttagaaaacatgatgggaggcgagtcagggcccaaagagtttcagactctttgatattcactcttagaaaacacaatgcacagataaagcacactgcagtggtggacaaaggggagcagaggacacacacatgagaaaaaaaaagatggctgttgtcatgtgcactaaagcagttcaagggttcggaggggcaaagcctaataacaacctccatgttcaacaaaaagatgcaatgcacaggggctacctgactgacacctctgtcgctccatccatcaccagggctgactcagttggtctggctgagtaggctggtgtctcctccctccctcactgctccatgcacaacccttccaaagctgtttgagaggacaaccttatccaatagatgaaaacctgtctttggtcaagggtggtatacaaggagctgtgctaccctgctagaacctccgaacaagctctcaagatattatgccctagtgggaatgggaaggaactacaaggcaggtaatgagggtgactatgaccaaggtacgttatacatatggatgacactgtcaaataaatgaaaacaactctaagaaaaaatatgcaatgtagtaaaactgccgatgccattaagtatgcagcaataattatgaaatgtgaaagcaaaagatttcatctaaacgcagcttgggagaacaaaaactgtacacctgtttcagtgacaatgcttcctctgcctccaagtttttagggacccctcttgccccagagtccttaccaaggtcattaggcctttctttccctgggtttgactttaccagcactcaccctactcactctgactggctagtgatttcaaacactgcccagacatgtcaccttcagcagtaagctgagatatcacttcttctagaagcttccccagccttccccacaaggctcctaacccagcatcccatgacaagagcctgtgaactttccagttgtcccaagtagactgtgtatgtcttctcaatagaggtcttgcccatttctctaattgctttgtcccagagccttgcgtaggacctggcatgtggagggactggggacatgcactggacggatgaatagctaaaagtatgattgatgggtgacacattcttgctactggcctccctctccactgtcagtgagtgacaaagtctctgtatgtctccacaataccagtgaccacagactaggagagaagagaagcaggagagcttgtggcattaaggttgatctctttttcaaacaattcctgagcacttccattgccacaaaaagatactccacgccctttagttattgtccccaacaatctccccacatatgctctccctaagtaacaactgagctgtcttatgcctctatatggttattggttctggacctttttaataaaggaaatcatctttcatgatcacttgtatctcactttcacttaatacgatgtttttagaattcacccatattgtaaaacctgcatcagtacttcattcttctttatgactgagtaatattccatttatatccatgtaaatattttcatagatcacatttcacttatccatatatcagtcacaaacaatgctttttaatatcagatatttttttaattttatttattaattatgtatacagtgttctatctgcatgtatgcttgcgggccagaggagggcactagatctcattacagatggttgtgagccacaccatgtggttgctgggaattgaactcaggacctctggaagggcagtcagtactcttaacctctgagccatctccccagcccccatatataaattttgtatggccataatgttttcatttatcctgcgtacaaactgaggtgtgtaactgctgggtcatacagtaactctgtttaactctctgcagaactgcaaggctgtgcttcctctagtaatgtgtaaccatctaatctctgcatacttgctaacactaatgtccagaccctttagttatttatttcatcctagtcactataaaatggtaggatggttttggtttacactacctgatgactaatggcattgaacatggcctaatatagtgaacgtacttgttgactatgtacatttcacatttttattttttacttataaaaatgtttataatgtaaaataacttattctaataaatataaagcatttatatcactctcagattatgctaataaactccagaaacaaaaagtacaagaaaaacaccttaatgactagaaggaactaaagaaatagtgagccaggagctagagatatggctcggtggataaagcactttccatgaaagtgtgaggactggagtttggatccgaagagcccacataaaaactacttgggcgtggcagccgcctataatccaacacttgggagacagggacaggaggaccccctccaccctacccccaccagagcaagctggtgaactagactagctggaaccagcaagctccagggagacctttgccttggaaaataaactggagaataattcccatgcaacaacaccacacacacacacacacacacacacacacacacacacacacacacaatggactgtctcttggggattaaacatgaactttggtcccagaatcatgtggcaaaactttttattcctcactctgagggagctgctcagcctctctgagtcatggtttccacatctataaaatggagcattatgaatacctgtatctagagataatttgaggagtaaagggttcacaccaaacacacagcatggtcaccagcacgtagtaaattgacatatgaaactagtcatcaaaatgaattgaatcaaaaaaatgaactgaatccccttttaaattctagaatgtctaggaggttttattatgcaaatacagattacgtctttcaaggaaggaatcatttgctttccaaacttaatcaaccacgaaccctttctcacaggtcctctgatagggcaagtggtccagcaaaatgctttgggggatcctcaacctacctactttgctttcttctcttacatgctggaaagttgaggtcctgtcccacagactccacccaccattcaacagcaaatctaaacagggaacctgagctcttgggctccccacttcttcagtaagagttttccaggaagccatcatgttgggaacaggtaaagaagctgtgttcttcccaccacaggctgcctattcattccaccaagtccagctctggccctctcagcccacccttacactgtcataggagagaagaaagagcgctcatcccatatgttctagtgagcttatcaactacctatgtgtgttgtgtgagagcctcctgctttgggagggaaccatcgtaacaacctgcaaggctgctttatagttcagaaccccttcgggctcatgaagaaagggagccatctttccactgctggtacaaagaggggcgggcacagatccaaaactcatcagccttttgagattacagcgcaaccaggtccttctcagagctgggggtgtgcaggctgctgtgtggcagacactctgggagtcagactcagaaaagaggtttaggtggaggtggaggaaatgctgtttggggagggatcttagaggccacgcacctctgcacatcacgctgtgtagaagagctgcagggcagtaaggcacacgttcaagggcagtactgctcactcagcccaaccgaacagaatacaacacaattgtatcagagaagacacccggaaaacaactgtaaacgtgagattgtgaagcccatccctgaaacagcttcccaacacatacccaccccctcacccacccccaccctaccccaccctgtccaaagctggcccagacaatcatgtagctgcctaggaagattccaggtgacagagtcgtcacaaggacctcaccaaggtgacctgggagcttctcctctaccctcctacccccacatggcaaatcagaaccaagaggatactcaaggctcccattagctgcggctgatttgtgggatgtactgatcagggctgactggaagaaagcagtctgtccattatgaatggtgtgagtccagcatttacagctctgtggctagtggagaacatatttttagttctaatagcaaaacatggccgaatttgttttgccaaagctaacagaatggtccagatctgatcaattattacgatcaatttaactagaaaagcatagcacatggtactatggaaagtggatgggatgtcagcagctctgtgactggaggaggagtcggtggcttggtcccctacacaggtatgtccttcagtccctagccacaatggaaagggaggtgcccacttcctcataatgctcttctctagatctcaaaacctgctggtcttctttggaactccaacacagaagacatagaaaatgtccgaatttcatttgtctgcaataaacttggcaaataagacttctggtattacacagagtagaatttttttaatttcatgtatgtataccatatttgcatcatttccccctcctccctccaattcatcctgtgctcacctccccccagctctttctcaaattcatgtttctttttctttactctctctctctctctgtgtctctctctgtctgtcttccagaagttgtccctattgctgaaggtgccatgcatgcacttcagactggacttaaaggaatccagctggaactgaaacagaagacatctccttggggactaacttttgtagtaacagaaggcattaggcaaggtgccaagagatggagccaaccactatccttacctagctgtgacatctatgaaccacaatgactttgttagtctatggatctttgaggaagcattatcacccctagtggcataacttcatttaaacttgtctgtgtctgagtgtgtctgtctgtctgtgcatgtacgtatgtgtatgtgtgtgtgtgtgctatgtgtgtgtctgtctgactgtgcatgtacatgtgtgtatatgtgtgtgcgctgtgtgtgtgtctgtctatgcatgtacatgtgtatatatgtatatgcatatatatgtgtgtgctgtgtgtgtgtgcctgtctgtcttcctgtgcatgtatatgtgtgtgctctgtgtgtgtgtgtgtgtgtgtgtgtgtgtgtgtgtgtgtgtgtgctatgtgtgtgtctgtctgtgcatgtacatgtgtgtatatgtgtgtgctctgtgtgtgtgtctgtgtatgtacatgtgtgtatatgtatatgtgtgtgctgtgtgtctgtctgtctgtctgtctgtctgtgcatgtatatgtgtgtgctctgtgtgtgtgtgtgtgtgtgtgtgctctgtgtgtatgtgtgtgtgtgtgctctgtgtgtgtgtgtgtgtgtgtgtgtgtgtgtgtgtgtgtgtgtgtgtaattttagctaaatgtaagaagaaagcgattccctgtggctctccacgtcattagtgccatcagtgctcctccccttcttccctctgtcgttctcccactttccagttacagcttctccctccatttccccgtccttccctgagtaacatcaataaagaattaatggacaatttaaaacaagaggccagtttggattggatgccccaccgcaagcctgctgggagagggtctggggtaggactagctaggcttagctctttgcttcctactctgccatgtggtggtgaaccgccttgctgtgccttttcctgcgtcaattgtcttatctttaatatgaggaaaagagcagctcttcctgtgcctgttgggagaactaaatgagataatgtacattaatgtagctagggtttcaatgattcatattaggtagttattgttatttttatgttgaaggcaggccacagatttgcagagagctgagctgtcatttgggttgctcagttcacatctcaaggcctcctgcttcttcatccacaaattagagatgaccaaccatctgagaacagcctgaggcttcagggagccactgcatgggacaaatgtttgcaaactgttacatgatattcaaagtaatctaatatgattatcctccaactgacccaagcctctggagaggctggacagagccattgacatgagtcaacagtctgggtgacggattaaaacccaaaaccacacttagagcttaccaatgcaaagaaaacacgtcaggagcatagaaacatggcctcaaagggatgtggtaccagtgctagagcaatgtctctaaagaagtgtctgacccatcctacttattggcttagcatccttcaaatagactggctgtatttttttttcaattgacattcaatagcactacctccctttggcctaaactctataatggttttgtccctattcaagtaagcttgactatggtttgtctctgcaaaagcccatgctgagattaaatgccaatgcaacagtactgagtgatatcaaggcctttaagagatggttggtgtcacggggcctctgccctcttgaacagatgaatatagctcccacagagtgagctatacgctgtaggagtgtgagttacacagtgtgttctgcttccccaggagctccctaacttcctctcactgtgtgatccctatgacatgaggctaattgtccttccttccacctaaggccttcaccagaaaccaagtgaagccagaggacttccagaaaatgagtctctttcccttaaaacttatcctgtttcagctacaacccttatacatggggtcgcctaaaaccgtcagaaaacacatacttccattacaattcacagcactatcaaaattacagctatgaagcagaaacaaagataattttatggttgggggtcacaacaacatgaggacatgtattaaaggctcacagcattaggaaggttgaggaccactgggctaaagcgacagaacacagactgggacatgaagagtcccccatcggggctgaagcgttatatcctaatggcattcgccttgggctagccaagcctggcctcagacttcactgatacaggcagccagaaatctgaccacttggctcacatcatggaatttatctactcgatgggccctctgaacgcctctgcagcctgatcattctccgagacaaagagaactaattattcacacagaattcttccttctcgaacacttgcatcctagggtgtgttaaagtgctttcagcgacagtctcttacttcatgaaagagtcagaaatgtatgaaacgggaagggggaatgggtgttaaagaaacatgaaataaaggaggaggaaactgtgttctccctgaccctaccctgctctcaggtgatggaaaaggaagggtgtgttcaaggttgcgccagagcagctctgaggaggaagccgtttggggaagcagtggcctgcaatgctcggtagagtcgccagtgcctgagggaggtggctcatgtcagaaagactcaccccagctggctctcaggtggacagccctccatggacacttttagtggtgtgaggaagggtctagggccacaacctggagcccaagagaaaataaatcacaggcacagtggagggagagacagagttgaatgctcccccatgctctgggctttgccccatttcctcttagctgtggttaaagagaaagcatcacattacactaggccccctcacatagaatctaccttccgattccgccacaggctgcctgcagctgagaagacacaggcctgagcttttactccaactcaattgcttcccctcctcaagttcctccctagccctttgccccctacttgtgtcctcctttatggttctgtcttctgccacctgtctctccatccgggcctctcctacccttcattcagttgcccaatttccctgcttccttccagggacctcaccatctccaccctgcttctcatctctgcgaccctcatcctggctcccttccccctcccttccccctcccttccccctttctcttctcctcctcctcctccctggttcctgccctgcccccccacttcccttcctcctcacttcctcctccctacttcctttgtcctccctgtcccccacctccctgctcctctgtgctggttgggtttctgtcaactcgacacaaaccagggtcatctgggaagagggatcttcaagtgagagaaaacctccatcagatagattggcctctgggcaagtctgtgggtcatttccctgattaatgattgatgtgagagggcccagttcactgtgggtggtgccaccctggggcgagtgatctgggttgtacaagagggagaactgatggagccatggggaacaacctgcctctgctcctgagttcctagcccgacttccctcgatgatggactgggttagggatatatgaaccaaacaaaccctttcctgccaagttgcttttggtcgtggcatctttatcacggcaatcaaaagtgagccaagacaccccctctcttccctgccccttcctttctgctccccttcctcctcttccctttagtttgtctcttctgtcttttctgacccagtccatgtcaatacatactttcagatttccttgctcctggtttctgtcaggtctgacggtaaattacagttttacgagcagtttacagaaggctctgctattggcagcagaaggaccagggaagacgaacagtggttcgtgtgaaataaatactaataagtgtaatgggaaaaaggccattttgtcatagaattgccaagcatgtgggctactatgtattctttctttgtagcctccctagagcctagcactatggctaacatgtaaaaagaaattcaaaaacatctgttaaataaaagcctcaacaaacaaacgaatgaatgaatgaatgaggaaacaagcatccttttattttacttgaagatgtgtgtccacagtgtctgctgaatgacagagcagagccatccatccccaggggtcctctggtggagacacattacattgacagacatattaaaagtatatacagcccaccctctcctcaatgggcagcagtttccttgttgacttcattcctggcaaatcctcttttataaacacagaatgccaggccacagttctggacacacaaccactggcttgcttgtgcctcagcaatgattcggcactctcccttcccccttcgcccctcactggttcatccttggatccttgtcactcatctatccagcaaatgttggtgctttgccttccctgtgacaaaccatgtgcgacagactttgtgtgtactatctcacttaatccatggatgactatatggaagggccttttactaacttttcttttcacatgaggaaccgtggtggaagccagccagatgggttcccccaactgtgctggtttgctcactactgaagtagttcccaggacactgaccttgaagttttaaagtcagaacaatcccaggcaagctgccccagttttcccgggacttggaaattccccggggcatgagactttcagtgccaacactgggaaagccccgtgcaaactggatgggttggttaccctgctccaactgtgtgcctggggccatacaactggtccacatgacagccaaaaccatttcgtctgattccagggccccacttttcctccaccttggccagctaacctctaacccagtatttcaagctgcttctaaaccacactgcagtcacacccaaataccgctgtaccagtcagttctccacggctgtgctaagcacatgagacagtcaactgatgcagatcaaaggcttattttggctcacaactttgaagctttcagccatgattcaatagacccattgccataggcctctggtgggaacgggggcaacttttcatggtgggattccatagcgttgcacaactttccctcagccagaataccaaaaatcagaagggagggtagggtctcctacagggcgtagtctcatggcttaaaggccctccctgtcttctaaatgttcctcacttcctagtagcatcagctatagaccaaacctttaaactcctgggtttggggtagaaaccccactctgatagctttccctagcctttgcccttgcttctcctgtggttctctttgaagacagaaacaatctgagctcttcatctacagccttccagcccccagccctcctgtcaaattggccctgtactctctgccttagtcatggtgctacaggcttctagatttcctctgttcttgcttccatcactggagaagtgtcagtctaccagctacttggggttaagattgctctggggaagacaaagaggaggcagacatggtatcccatataagcatctttcacctagtttcagggtatactttctcacaacccctccttgacctctttccttatatccagaacatctatggtcaagtatcctgacttggggcactgaagttattcgatctcagttttcacctggccatgtatgtgagtctcaattcactaatgagattgccagagtgtggggacagctatgtcaagcaagcctttcttctgcttcgcacaatacatctaaccttgtgacaggcacataatggctgatggagaattcctcatcaagctaaactaaattggttaaaacagattctctgacacaaacaatcctatgtaacaggttttttgaggttttttttttccccctgatccctaagtacagaacagctattctgtcagagaaagccttaacttcaaatttccctgccatctgggagggccagagccaatcaagttgacccatttacatttcttattccacctctgccgaggagtctgcctccttcccttcctcttcctccacccccagacatcttagagcctaatcaccatcttcggaaccctccctgtcaacttccaccccctcaagcaaatgtacataccacctcaaacgctgaaccgcagtcaaattttaaagttcaagaactgaaaaagaggagcaattgactcatttttccttgattcaaagcactgaagcttttctaaagcaactctgacaccctttgcgtgagcctgttccagaagcagtgcaacccaaggggggtcacatcacactgcccaagttaacagtggggaatgacacgattctcctgcaagtatctggggtcactgggtctagattcacctttccccacatacatccgatgacagtgttttccttgtggctgctccccttccactgtacagtttgctgcagaatcaaccccaggccccatcaatcttctgtcaccagcacagctctgcctttgccagtatgaaaagtggagagatgtattcttctccttttactttcttttttatccttcccataaggtccatgttgagaactcgtgaaaaatctctaattcacccaagatggaagacatccccagcagaagggcaaagaggcctttggagatctgactaccctgtggggtaaagctgttgtataaacttgatgtgtagggtccagtacacatcatcccagaggacagcaaagagcagatcctacacagtgctctgaaaagtcaaccccagctccagtgttccagtactgtctttggatgggcagaggacctagggatcccactggcccttccttgcataaaagggaattgtgtgtaaactataatcgccttctagggaaggtgactcttaaactcagtaagatctttgacaagtttgaggatgaaaatatcctgaggctgactgtgggcagagaggcatggaagggttgaagggctttgataactaataaccaaaaaaggaacataaggacaaccagtgaagacagaaagagaagaggagaagacaaagaaaggctggggcttcacatgggattcagtagccacgcatggggtgggagcagcaaaacaccaatatgaaggtgtgggctgtcaaaataaaagccctttcatctccctttcaaatctaccatgaaattttttccataaacttccacgaatgagtgggtttcatgggctttgtgttggtgggactcggggaagaggctgggctgcaggtttgagtcaactagggctaaaacatcagcaagaatagagccacggggcaggggaagggagaggagagcaagagttagaagccagtacgatgaccagaaacaactgccaaagaatttggagaactgctggtctgtttctttggtggttcaagctcatctctctagttgttgtaagggaagattccgtgtgcatgggcatatgtgcacatatgtacacacacacacacacacacacacacacacacacacacacacacacacacacacacactcacaatgaacatttggataaatccaggagcagacacagggtatgcccggatagcaatggactagtgaatctggaatctggggccccttcttaaaaagctgaacaaatggaattttggcctctgactgccagtaaaatgccactgcaagagacggttgctgactacaggagggtgcagatgtgtacctttaagtgtttacccctgggtaaaaaaaaaaaaaaaaaaaaaaaattgaccaggagcatttgaaatgaggaggcatggattttgcttgatggttcagggcttttatgtagaatataagtatccaaaaactgaagttcctcaaagatggcagctggagttctttataatcacagcctctgtgttaacactattaaagagcgcgtggatgagcactggggaaaaactagcacaagaaagagagtgagaagagctagatggagaaaagaccgtaattcctgagaaccagaatataatcccagagaagaatagatttgaatgttctaatttccttggtgctactgtaataaaacactatgatcaaaaagcagctctgggaagaagggatttaattggcttacacttctaggtcacagttcatcactgagggaaggcacgacaggaaccggggatgaatgctgtttactggcttactccctggctcaaacttcgttggctttcttctacaaccaaggattacctgcctagggtgggactattcatggtggtcctgtattaattagctgtgaagactctactttatagaggtgtgcacagaccaacctgataaagacaaatactcaactcaactgtcactttgccccaggagattgcagacgtgtcaagaaccaactatgcagacacccctttccatagattagtataaaagaaccagcaaatgaggcatccctcacaacctctgaccaaccatctcaaaaccctaaagcttttaccttttcatgttttcatgtctttgttatttgtcttttcacatgcagtttctaaatgcccaataaaagccaaacactcaactgcatgctagggtacagagatgaaacagacaggacagcccaacggtcctggacttcatgcccacagctgctgagaaaggttcgcgaatggagttgtttcagatgctgccaagggtcctatgactgaaataaagcaagaaccttgatgggaacagcttgggttgaggactgcttagcagccagtgattgaagaaaaatgctaagtaggagcagtgagccaaggccaacctagagaagctgctagagaaggcaccctgaacagaatggccagtggatgcagctggagatgccggccatcctaagacccagccaatcccacaggggcccaagagccacaataggcagtctcaggtgcactgaaatgagctggaaaaagccctttctccaacaagcagaaactgtgcttacagaagaagtccaccagagggctctgtggggagatctccaccccccttgctcctcccactgatgacgcttttcctgttggaaggtagaagcactgtttgcctctgaacaaaagcctctctataaacagccactatacttcggtgaaaagaaaggaaaagaaccaatagcaactagcacaatagagcagcccagataaaagatggaactgctatcctgtgggctagcagagagagggggggggaacagagacagagacagagaaacagagagagagaaacagagagagagagagagagtcacccttccactactcagacccccagaccctcatccccatctatgctcagcccaactgatctggtcaccctcttttccagctaggcgatccaagatagttgtccagaacacaggatgccgaatcttcaaggagcacacttgcctgggaagcaatggctttaagttaaaaaaaaacaaaaaacaaaaaactaacaaaaatcttgtaggatggtggagtgtgaaggtaaggttgggagagtgccggggtagagtgaaagagcaacaggattttctattttggccaagactgtcttacaggaattacacttattattcttaagcaccattaaataaaggcaagaattgttcctgcctagcacccctagaaatgtgtgattagaaaagcgggggtagtggctgggatcagaagcagagggttgcaggtccattcagtgcatcagctaggtttttcagagacacagagtccatggactttggggcattcccaagaatgagaaggggaatggttataccttatcttcaaggcatttgaagctcctgttggccttgggcatccttgcccactagatacctttttcatctactggaagtagccagctctcctgagtcctcaaatcctaacagattagagtcctgtctggtcctttgctgctctgtaaaaggggaacttcctaaactccggtccaagtgtcatccacatctgatgtcctccacctgccactgcctcccagccacagagcctggtacctgcctagctctcagcaaatgcttactgaacagaagtttgacaagaaaacaagaagcacaggacagtctgtgaagggagaaagccattgagaagggagtgaatggcatctcatattgcatcttcccaggtagtcccccacccccacattccacctgccttaaggacactcagtcaactgggtttgttctctactcccatgaggtggaattccgaagcctggtcccctttgcctcaaagcactctgtttcctagattgtgcttgtgacctctgagggccttgcatgacaaatttcaaaagacaggttccagagactcgtgcacacctgctcacaggaggccgccaatgggtggtaccttgacagattctgacacctgagcttgaggagatctgtgtctatggaaaagttatgagcccctggctctggaagcaactggcagacagcttgtgcagaccctgtcccgtgagtcggaaggatgaactttgggaagttgtgctgtggcttgcaattagcaacatttccatcaagctttgcccatcagaactaaaacctaaacttccctctgggcttgctctacagctagggcactctaagagcagttagcaaaacctggggatcagagcagctgaactaatgctttgttagcatcttgtattacccatattgtgagtagcacttaagaactctactataggacagtcaaggatgaatgatgaagaacaatggggaagggagaaggataaaagaatagcattaagtatattcataaagcaaatacgtacctcacctgaagaatataatgcttatcttgggtggaggcgtctttgacaacattgctctctgtgttctgccctccctccatccccctgccctggtacaaactctaggatctagttggctttgacaactcccactgggacaaactaaagcaaagaagtgaccttgacccatgaagctctgggatgacttttgcaaatgtctcctcaagaagagagaaaagtgccagaaaggaccctggtgatggaggaagtgagacctgctggccagttcatcatctattcctgatggtcatgagtgttgtctctccaaaagcatctggagggtgaagtatgacggagtcctcaaacttcaacccagagttgtctctgtgtgaacacgcttcatttctcctttgttctgccagcgccttgcatagggatgtttgagacccacctatggcattgctcttaccacatctccccaagtatcacttgtgtaagtgtaccccaaatgcctgcacgtttcatcaaacactcctgaattgcctcacactgtggagtagcaaccatgtatgttcccacagttctctgaaattccatccctcccatgtcagataactgcttagctgaatttggagtaaatatttgtttaatgtcatcagctcttataccacaccaagcccatctctttgttcaagggctgggaaaagcactggatgatatgtgaaactcactcagtgacccataggctgacttgatattctggagccaacatccaggtctcctgcctcacctcctgtttctctcttgttacacctattctgacaaaatgagccactgactgagtctgtacttaccctcccatctctgtgactttaggatttctctcttggggaactgacatttctgtatcattggaagacaactggaagctgacacaagaaaaattctattgattaaattttcccctactgtaaattcatatccacagcaatggacagccatgaccactgcttcattccagaagatgttcattaactcaagagtgaaccatacatacactccaaagccatcattgtcacccctcttaactcctacatctgccaattgctagctaatcttctcctcatttctatggctttgtgtattctagatatttcattcaagtggagttatataatatgttccccttagtagctgatttatgttacttacataacgttttcaaagtttatctatgttacagcatgtattggtactctatttctttttgtggtcttctatgcatacctatactatagagctaatccacattttatttactcattcatcagttaatgaacacggtggtcatttctattttactactataaatatctgtatgagaatatgttttcaattctccaggtatatacctaagagaagaattcctgggccaagtgttaactatatacacaaattgcgggtttaggtaggaactgatcttcaaaagtagctatcccattttacatccccacctgcagtgtctaagaattacaatttctctttattcattccaacctcagttactatctcatgatggttgacaatgattgtggtgatgatggtaatgactgccaccatagtagatgtgacatggtacctcattgtgcctttgacttgcatttctctgacagcttaatattgagcatctgccatttgtgtgtatacaggtgaggagatggacacaaggtaccatgatacggcaaagggcagtcttcacatcacagtccccctgtcctgcctcatcctcctctgagtgctgggattataggcatgtttcataatcagctttattcatacattttatcgggagaaatatttactgtaatcatttgtccagttttaattgggtatttgtcctttggtattatgctgtgaaattctttgctttttcagagtactagactcttagaagatatgagattggttcgtattttctaccacactataggttgtccccaaaatacaaaatttaagtcttgatgaaatctagtttattttttcattgtttttactttgagcactgtatctaatattgcctattccaaggcatgttaatacaaagatttacgttttttatgttgttttcttcttcaagagttcataattttacctcttgtatccaggtctttgaccaagttgaagttcagttgaagttcattttttttatgtatataaaaaaatatatatatggagtgaaataatctaaccatggcaaaaataaccaatggtccagtctgaggtgtgataggaacacaaattcagtattatgtgctgtgtgtatcctccaagagtgccaccacctctgtacaaatgattttatttagggtaagtaatatgaggaggctgtagacttcttaaactatataataatgtgcttacagtgccttaaattcacagatgcccacaaccaagaagcacaaccataggatctgcattaaaatgctatactcattcttccttccctcagagcttaaccacagccagagctccgagcaactcccggcaaggctaaggttcatgctgtagcttacttggatgtgtgcggcctaccctacttctttgagtgccttatctccacagagctctgggatatggggacccagtcccagcacctccagctcaaggttgacccatcttccccctcccccagccgactcagatccaacttcctcttctctgggcagcacagttcttcccctcccccaggctcaaactcaatgtcatcttcacttcttcttcctctctccacccctcccccaacatctaatcagttttacataatcgttcctttgccctggccacctggcagtgtccggcttggcctgtgctcccattcggagacctggcctgatgtagtagatgtcaccatgcctttgcattcctcaccgtctaagtcatcggagcacaggactgaccagctgaaagagcagttcctaaaattcactctctgactcaagaaatctcactgtctcctcacgattcttccaatttattatggtagaaaaaaaacaaaacaaaacaaaactccaaggtcatggatccgaggccagccttctctgactccaaccaacccttgggcctcctctttctgctccctccatagtctgcgttgcagcaggaagtgtcctcactggcattctctgcacttctgggcttcctgtcttctctgccaccatctaagcaaggtggtcctgctggggctcccagccctgtccctctgcgaccactttggtgaagctccttgacaatctgccagaagggagaacagctgcttaatgtgccattcacttcattcttcatagtgcttagcacaatgtcttgaacgagcatgtccttagtggatgtgtgttacaggtggcagggagtccaccagcagctgtgagtgacactgaatcacttgaggaactttttcagaatatcccacgggggactcacatctccgtactttgaaaagttgtcactgaggattctgatgtaaatcattgagaacttcaaagctgctcgtggtggtgcaggtctataatcccagcacttgagcggctgaaggcgaatgattattgtgagttcaaggccagcccaggccccagcctgggccacttatcaaattaagaactgatgattaaaatatactgaacacttgttgtaggccaaatactgtgagtgcctcatctcatctgtcctaaaggaaacttcacacagtagggagctttgtttttgaattcttaagattagaaatgcaagcctaaaaatgctaaattatttgcctctgatcttttcttagcattatagatgaaatggaggccactgtatgtgacttaaagcaaatttatatggggctagaaagacagctccatggtaaagagtgtttagtgctgttgcagaggatgaggatttagttcccaccacccctggcatcttgccacaactccagtttcagggcatctgatgccctgtgtgggcctctgagggcactgcactcccacagtgcacttaacgtatgtggagataaaacattcatacaggtaaaataaaaacaataaataaacctcttaaaatataaattagatgagatgatagtcatcactaaatgttacttaacaatatttgggagaactacaacagtgatttattttttccccagaaaacccattcggatctagttattgagagctgcattctccttttcttagctttgtgtctttggataaatcacctgccctctccgagcttctgtcttctgtggaaaaagtgtaataaatagctgatgtgaagcaataaaaaggattatatgggttaaaatgtgcaagatataaaatgaccgatagcctagctgtaccattacaactattttcattcaaatacacacatcattcccaggcacacgtttttagattcagtcaacagtggcaggttgagcgtcttcatagcttgagtgacaggcaaggcagactctcagggtagggccagaattagtattaagtggatttttcctgaaggtctcctatatggtagggcttagactagaggtgtaagaaaagtaggtctttccctacaagtagcttaatttttgttattaagacctacaagggaattttgtttctctgtctacaggggagttggcccacttggtggaaggaagtctgaggttcttggaaaacaagctgtgtcaggggttctctgcctctgagcttaagtgtggacagtttctacagaataatctttctcagactctcccagacagcggaggtgcgaatctgactcccgggcctgtggatcacttctgtgcccatatggggctcaggactttcaaacgtccctgtttcccagtgccttaacaaaactgagtccacttcctttttctttcctagcttaatgtactttggggtggggaaaggagttgattttaatgtttggatttttttgttctacagcaagaatgcagaaataggaaatattttttctagtcagcctgtgtgggacctcagggctgttttaactcttgaacttgcatagcactttagagtttgcagttttctttcacacagactctgatgaggtaagaacgattgctgtgtgcatttaaagggaaaggggctcccaaaattgctaaaaagctgctttaacatggaacttccagggagtgtctataagggaggggaggagacaatgtgggtgggcccagagaaagggcacctttctctgctttctgcttcttagctagaaatcagacacttcacttagagtgccaacatccatactgtgactttgaacttacagagagtacataaagaatggcaaagcagaaaaacaaaagaagaccacagtacttcaacatgcaatactgaactgcctttaggctctgtgtgtgtgtgtgtgtgtgtgtgtggtgtgtgtgtgtggtgtgtggcatatagtatgtatggtatggtgtgtgtgtgtgtgtgtgttctgtgtggtgtgtagagtgtgtgtatggtatatggtatgtgtgtggtgtggtgtgtggggggggtggtatatgtatgtatggtattcgggccgtgtgtatgtagtgtgtgtggtgtgtgtatgtgtagtgtacctgtgtttaacacagtatagttgtgtctctgagtttaatagctataagcacttttgagttgctttttaggatcatttacaactatataaagttgttaataatcaccatcaggaaagtggtccagcaagagatgtgacattactctgatgcctgaatgtcactctctctccttcttaagaaggctactacaaacaatcataagaacatagacacatctctgggcctacaaaatagaagtcgcatgcatgctatgagtgacattgcaaaaagaatctatgtttgaaagaaaatactaaaacccaatgaacaaaaacaaaacagaaatcaagatgacagagtcatgactgctggtttctttttgtcctgttttcaaattcatccttgaattaacgctttttaaatgttgagtattctgatccactttgctgcttagttatcaaaagcacatggatccagggcagagactggagtcaaagactgtgagaacaccagtgaaaattgtcccacactggcacccatcaaacgaatagcactgggaaatgactggcttgagtgaagtgcctcctagctcattcgtgtgacctggagcagatgggtccatgtctcagaggctctgctctcatgcatgatgtggagatagcgtgagcttgcctggcccacctcgaaggactgtggtcactgagacaaagccacatagacatgatggctccaggacagaccaagaatgacacaaactcctaggatgcttttctctccctgtttaagttataaactcaactccagactcctgggattagatggttttgtagaaaattgtttgtttcagagacaggaaatgctggagcttcacacattttccccattaaggaaataaaacctgagtcaacagtttgttatggagaacaggaagttgattctagctcaaggataggcatccaaaattcagccagcactgagagggttttgattctgtccacccttccatcctgggcggcctccacctttgccaagtcacccaggtggcataccttgccattccaaaggaagtctcacagactggaaatgctgtgcctcagagaaaatgtgtggctttcatgtctgtgtctgtgggagactgaatcaatgaacaaacttaggacccagccctgatcagccctaggacagacagcatttcttatttatcagcttattatttcatctaaaacctggggaggcttctaacataagccttagaaagtttaaaatatcttctgaggttacagataattttgtggaaatatgaaatggtaaagtactttggaaaaatagtttggcaactcaaaaactaaaatacagaatcatcaactgtgttcctaggtacctaactgagaattgaaaatatatgtgcaaacaaaaacttgtacacaagttttcacagcaacattgttcataatagacaaaagacgagaacaacccagatacctatcaactgatgaaaagacaaacaaaatgatatatccatgtgatagaatattcagccatgaaaagagtgaaatactaaaaacactaagtacttcattatatgaagtatccagaataggcaaacttgcaggagcagcaagtggtttagagttggccgaaacaaatttattggctacatagattctttctgaatggttattaatgatggttatgactgtccaaacgaaactaacttaatgtaagtggaggtgcagtaaaaccacccacctagaccactccgtgaatagaaaggtattatagggatcaaataaggcaattcatcttgggggcggggaggcaaagaggagagcaaatggtgaaaaagcaataggatttcatttgtgacagtctacagggtggggggatctttgagctgataacagtctggtcaggacctgaggtcgttgacctttgacctgattaaggaaggtccctggtggtttaaggaaggctccaggtaaacagaaacccacctccagtcctctgtttacccaataataatccctctgtttactgggagaagacctctgcttaggatgttctcaccagcaccaccttcttagggtgctgctttagacataacaagtagataaactgaaaactatcccagtacatgctttacaatggtaagttttgtgttttatgtgatttatattaatgtttcaatggaaaaattaagtgaataaactggtaagaaaaggaaggttggggtagattccaaccaactcaaatgagtcaggtggaattatactttattgaatcaaccttaaagaaattagttttccatcaccggctgtaatttggaaggccccttctgccccagctgtagtaatgtgtgttgaagctaccccactccactctttggtatatatattcaaagggctctaaataaacataccacagacatattaagtcattaaaaaattaaattatgacattttcaaggaaatggatggatctggaaatgattatgttaagccaaataagccagattcagaaagacaaattctacatattttctttaatatgcacaaactagacttaaaattatatacatggagggtgtctggggtgtatatgagtggaagtatgtgtgtagggtgtgtgtgtgtgtgtgtgtgtgtgtgtgtgtgtgtgtaagagaggggaggaggggggaatttcatgaggagagaggaagggatcctaagggaccagatgattaaatacatgtgacatgaaagcagaagatgggttggggtgtggaggataaaagggaaccagccagaagcaggcagtaggctcacaggggagaagaggggaggaggggacaaattagaaccaaatatagtgatatatatatatacatgaaagggccataatagaactctattttatatgtataaaataatggattatcttgtgtgtaatagtaataaaattgtttaaataaatacaatttgtattggtaactttattcccttcacagctcctagcagataatttatacccaatcaatgaatacaaatgaaaaatcccaaattcagtttcctaactggcaaaatcagcttcttagtgaatccgtttggggaagcagcaggacagcctgcctggcttcattaccaaactcataatcaacaggagcagaagagtggtgcagccggggttccagtaaagaccagggccccctggcaatgctaacatcttgagtcttctccccaaacacttgagttttggtggaatcagaaaattcccacactcaattcttccttcacctgtatcaaagaagatcctggatatttttagaggttgtcaaaataaaatcaagtggatgcccttaaatggttaaagtgaatctactttcagcaacatatgtaggtagaagagaggtaatattgatcaggccatagcaactggagtgggatctggagaaggatctggaaagacagtattgaaaggatttgacctgagcctgactcagctccagtgaacagttccaaagacccaggcaactgtgtttaacagatgcttgagctgggacatggtgcccagcactgccgaagtcacagaagccagacccttgattatggaggagaatctgagagccagcgactcagagggtcagtgtgaggcagctctgcaaataagggtcatccttggctgagaacccaggcttctggatgccggttatgttttcccacagcctcttcaatcatctactgccagaatgtggttcattatgctatttccaaaccataaggaatatgctaagtaaaagtttggaaacttaatgcaatgaaggtaaccataatggtttcctccagggtcataaatcttataaataccataagtgaaggtctgccccagttttagtgacaagaaaataaataaatacaaattaaatcttccatgcctcactgtggctctggtgtctggaactagttgaaaaatggagattttgggtttggttttttttttttccctcttgtgaatttagctgtccccttcaggtggcaaattcatctgcagacgcaaacctcagtgaacgccattcattttctgagttaaggcagaggatggcaagccagctttgaccagacttggccaacatagagtcacataacttatacgagaactacagaagatataatatgaaaattggctatatatttatttttctaagacaccagtgttctttggaggcagcagcacataatgaaatacaaatgcttttggaggcagggaggagcagacttcatgagcagaaactgcagaggccattgcagagcagagactccttttggtccagcaaatattcactttgtgttctctccacacccatgtgtgtctgtctgtgtgtgtgtgtgtgtgtgtgtgtgtgtgtgtgtgtgtacacacacacacacacacacacacacacacacacacacacacacacacacacacacgtatgcaccagtgtccacagaggccagaaaaaagggtgtcagtttccctggagctggaactacaggaaacactcttaacctctgagcttctctcttgccctgggtccatttttaaagttgtttcctccagcacttgaccctgtgattgaacacagagaagccattgatggacagttctggagccaggctacctgctgtactgaattcaattgccctgctttggaaatataaaccagagatctcatcaccatgcggtccttcctagacctgcagttgggaaaggtgatgtggccactcctggatgtgctgcagactgctgccaacttgggcagtgaaaagctccaggaacccctcatattggtatcccccaaacttcaggcagagaaggaagcagtcttcattggaagaaaggtgggggaaggcctggggaactggctcaacagttgagtgcttgctgctgctcttgcagagcatctgagctcagctctcagcactcacatggtgattcatgaagtctaactccagttccagaagatatgatgccctcttctgacctctgcagactccagtacatgtgtggtacacatacgtgcattcacacacacacacacacacacacacacacacacacacacacacacacacacacacatgcacacacacacgcacgcacacatgcatgtgcatatatgcacacaggcacgcacacactaagaggtatgtttggggctaaatctgctttgttccttcatcatattctaggctaggcagtccaaagcacacaccttctgacagagactgttgatgtcaatcttgtctttattaccaaccaaaaaagtcttgagcaatatgccaaatttaaaagaattgctacattttgttatacacattatattacatcttatattaagtagaaatggacagtaagatgaaagaagttagtaatgggactttcccagtaggctgccatcctatctactaaacagaactcagatacaaatggagctctagtggccatcttagacaatgtggtattcttgacagtggatactgtcaaagagaaagattgatgtatcctggttctcactgacatacagagctgacatactaaacccacactattccactctcatttcttgagttagaagagttaagtctctctatctggtagacctattgctagatgtcttttccatgaataattaattacaattaattcttcattgaaagagaactgatgtcatataatccacaacattatctttgaactaaacaacaaacaaaatgaaaagggaaagctattgaacactggacccaggaagggtagtcttcttccatttcataaatcttctgaggaactgaagaataactcaatgcctcataaagtctggtatatttttttaaagttcattgttacattagcaaattctaaaggaaatgtaaccaaaattacaattttcctaacataattctaaggatcttacctgtgaaagactgagggggcttattcagtgttaaaatgaaaagatgaaaaggaatagaagtggctcgctgtttcccgttactaacaaaggtttcagacgtggagcacccttcaggccctgccctgcgagaggctgggaggacttagacacaggaaataatgttctttaggcttcactgaagcattcattttctccctcggggattcatccacctttagcaaagttacattaccaatgtgtctcttattatttttaataagaacagacatgaaaattacaactgcctccaaagaaaagctacaattttaggaatcatcaagggatttgggcttcttcttgcatttcttcttgtgaccaaaacgttggctcacttcatctcagctcatatgcctcaaagtctcgatttctgtgaaaggagaaggcagattttaaaactatgttgctgctttcccccgccaggttggctcttcaaacagacacagaaaaaaccatggcagcccgggcttctggtggtggacacagtctctctctctttctctaagtcatgtgaccatcccctgtaagaggctggtctgcaccactcatgaccgacctaggagtagaaatggcaaatattctcaacatcagaacttttgggtcacttgagtcagtgaaagtgacaaacacaagggagagatcatgtccccagaagaaaagatttcattatcttccttgaaatacagctgccgggattatttattgccactgtgaaatttcgcaggaaggttttgacccaccagtattcctagaaaatgctgtcccttgtgtgtcttccacattccctctgatcagtagccctaagctgacctttcaagatggaatacaattgggaccaaagaatcaccactttaaatctttaaaaatctgaacattgctaaatattaccatgccattcctaaaaccatcctcatatggcaaacatcaattccaggggtcatttgaaaatcagaaagaccttattgtccttcagatttaagcatgtttgtgtgtatatgaacacacacatgtcatggtgcatgtgtgagggtcagagaacagcctcaccttttatcttgtttaaggcagtgtctcttccttggtcatccctgtgaatagcagtgtagctggctcatgcacttctgggaattctcctgcctctgatcgcaggacaggaacaataggcacatgctaccacagccagctttacatgggttctgggatcataattccaattctcacagttgcatggcaagcgttgtacttctggaatcacctccacagctcatccttcaggtctttataaccaacccttgcagagaaggatccagagttaagagtcgtagaaaaaggcaggcctgggcttccctgaccgcagaatttagacaaatggagctactgcaacagttcatacataccatgtgtgggcatggagggctaggctaggtaagactcaaggacggcactcagcaagatgtttgagcacacaggaggcactcggtaagcccttgcttggctgccattccttcttctctccaacagacaggactctgggaagaatcagtggaggacaaactcagaaattcttggaactattgccaaacagagagtaactagggcctctgtgggttctggctattctgagaagccgcacttggtccaagtgggtaagccaggcataaagcctaggtctgggctctgggacctagcacaggaactgaaagctacagctgacagaggaatgcctgcttcctgtctgggtctaccatgcctctcagagtaactacattcttttaattaactttaaaaaattgaagtagaattatgtcaccccacacacacactttattccctccaggtcctcccaggtaccctctctccagccctgccctccccccaagttgatagcacctttttcttttgtcattattgttccatacatacatgtgtgtattatgtgtttacacaaatatatataaatacagcctgctgagtgtgtttctgttatttgtgtgtatatggtctcagagctgaccactctacactgaacaatcgataaggggctcatgtctgggagaggctaattctctctcttccagcagtcgttggttgcctatagttcctgcctagtgataggaacccatgaaattttctcccttccacattcatatgttaccattgacgttgccattgttcaggtcttattttgcggtcatttttagaagatactgtttcatggaagacttcttggtattctggctcttacaatctttctggcccctcttcccgaaccataaatgcaggagctgtgatatagatgtatccattaacagtgggctgccaggtggtggtggcacacgcctataatcccttcactccagaagcatcgacaagtgcatctctgtgagtccgaggccagcctgatccatagagcaagttccaggaaagacacagctgcacagagagaccctgtcttgaaatcgaaaacaaaacaaaaacaaacaaacaaacaaaaaagagtaaaaactccaaataagaaagttgggctcccctgttgttctctgcattgtgtccattttctttaaagagaagcttctctgatgagggttggcagctacacttatccagggatggtggcttgtgcacacagagattgtcacttatgtcctcctgccagacgtgcattaaaaatgattcatatatgatggtaagccagaggtgcataaagaatggtcctggaagacaggacaggagatgtcattctagataagggagtgttcatggaggcattcactgaggaaatgagattgggactggcttttggagaatgaatacgagttaaacgtgtggcttttaataaagcctaataaagttgcagagacagtagtaggcaactggaactatacacaaggagtagaacaaagaagcgtataggcaggcaaggagagtaggctgtgatggtaaaggaactggaggccactgagtactagggggacctgatagagtcatgtcctctctgtgacaataatagaacagtgcctggcccagagtggtacttagtgaactcaggaataaatgggtgaaccattttacagcatcccatcacacacattttaactgaaaagatgagggtatggaaaggaaagtaccacaagcccagtattgacccacgaagtggccaatcctgttgctatggtggtgacagcctacaaacaaaccaacaaacatagagcccagggagcaatgagcccagcttctgaagctcgtgtgtcagaattctatgccttaagcagcaccctaacatattcagcagcgtgcaatgccgaaaatctgaaatgcaggaagttctctggaagactgtacatgtgatatcacactaactatgtgcagaccctgtctcaagggcttgtgaagagcctaggtcatatcacagtgcaccagaatgacaaggagtgggtcctggaacctggatgtctaatttgttctttgagtcaagccagtgcctggactttgtcaatcactggcaagggagacatgcactgtctactgaccatcacccacggaagaccagccacactcatggttaaacactagaaccctggaggagaacagccagagatcaagttccagggttttctcaagttcttgctttggtgagttaacttctacgtcatttcatttctagcatctgctgacctaaaagaggtaaatggtggcagtcctagttcatatggtttttctgagatttttcatttgcatattaataaaacagtttccaatgcagaccagagggtagagggtcagataattgtttgttgtagagggaatgcctgtacattgtgggacatttagcaacgtcattggtctctacccactcaatgctggttgtaaactcctccaaatactgacaattaaaaatatctccagatattgcccagtattcccagtggggaagcaagagcatgtcccagttgaaaagcacatatgtgaaaacagtgcctggcccacagctatcagtatctccagaccatgtgctgcatgtgttcattctcccaacaatccaatggtattcttctccccaattttataaatcaagaagctgagagtcagagtagtaagtattttacatgaactcctctctgtccagagttccctctaccagaaagctgctcccatcaagatcagcctacccctctgtccagagctcacactgcacctgctcagtgagaaagagaggcgctctcatcaggtggccagtggagacacaacccttggcacagttttccccatgagaaaagcagaaatgcagttaccagtccctgtggcctagcaccaggagctgtgccatcctcctgcccagagtctgaaagcctaggggttttaccctatgttccaggataaacctcaactgaaaggcattaatgggctacttgtctcacagtctaagttagggttcacttcttaaaaaactgtctactatgagtagatcacccccaatatttgcctttatcgccttgggaatgccccctcctagaactgtctctcccccatatctctgttttcacacacacacacacacacacacacacacacacacaaaggcatggctacagaggaatgcaatatttagactgctgaatgaatgaactatggatggtcttttgtatctccagctctgggacacagacatttaggactgacttacatgttccacgagatcatggcagctcctagaggatttcagaagcccacacagtggggttttcaaatgtgagcagcacaaggaagatgataaagtgggtcatgataactttatcattgaagtgtaaaagatacgtacactatttataacagtgcccggcacataatggacaccattactaataatgagattttattgtctcagagcaagaatatattgcttaactgaaacagatgtctcaatagaaatttgatacaggtacatgccacagaaagatgctagataaaatatatatagcataaatttcagaggcagtactggttataactcgctgcctagaccactgagataactacgcttacaagaacacacaagatgcaaagataactctgcaaatggcagtaggacagtgcggtcctgaggtcacgggcagaacacaggcaaaaagtagagggaggagacgtcagagcagatctcagacagagcccagacaagcagctgcagagaagtgtgaagtgtgatttgtgacctggcacttcctgccacaacatggtagtggttggaacaccaaggccctggggtgtcccctccactatcagcatgactcgaagggtgttgaaacagattcaagtgactccttcctctgaactccagtcccctgaagactcaggcagagtgcatccccacggaaactgtgaaccagacactttcaaaagacaagcttgtgtgtaaatgcacaacttgtattatttcataattctgaactttcataacctggcttcccaggtagttgcgatgatgacaatgctaggtgatttactcaacaatgtcctaaagaggaacctgaaaagctcgggagtgaatggaatacaattcaaagatttgtttttatttttagtgtgtgtgtgtgtgcgcgcgcgcgcgcacacacgcacccgcgcaagcatgcgtgcgtgcgtgcacacatgccagaaaagggtatcaggtcccctggagctggaattacctggaagcactcttaagcactgagccatctctctttccctggattcatttttaaagaatgtgtgactggcttcccttctttgaattctctcttgggtctccacctcctaccacctgaccccgtctcttgtggtcttctttgttcacctgcctgggctcatgaccctctgctatttcttacacctgagctgacctgagtgcccttcttcctcttcctccttcctcttcttttttgtgctaaggagcctaggaatgtgtgtgtgtgtgtgtgtgtgtgtgtgtgtgtgtgtgtgtgtgtgtgtgtgtgtgtgtgctttaatccctgcaactgattacagtgtgcagtgatgttgaaaagctaccggtctcctgtcctgtgcttatttcaacacacctgctcccgatctgtggaattgtgttctcaagtcccccggaacttccagctgccatgttcagtggctgctgctctgtgctcattcttagctttgctgaggcagtcttgaaaggtacagtgcctcaccgtatgaaatttctctgtgttcagccaactgagaccactcggtccggcactccaggtctacttcccccatccacttctgaatgtgagcatgcgctcagtcagtcacatcttcttaatggaccagcaagtgacttcagatatgtgactcgtgcctcagctgccctcaagctagacaaacccatgtgtgttctcctcgttgatctagcaaatcccgaaagtcacgtcccccaaacagttccacaaatgccaacttcaatcagttgtcgtctctttccctcaaaatctttctttgtagatggacaatgtctgttacctctcctctctttctctgacacagatatgcttttctattcttcctttgtaatatttatagaaacccttcttctacatctgatgggggatgtccttctgtatatgtttctcttattggttgatgaataaaacactggtgaatagcgacaggaagataggtgagactaggagatgaggaggattctgggaaaggtaggcagaggggacggaggaggcatgatgtggctgaacgagtaacatgtctgaccaggtaagccacagtcagcctcgtaatacatagataaacagaaatggattaataattaagacacagctagccaatatgaagccctagccaccagccaacagttttataattaatatagcatctgtatgtttatttggagctcagaatggtggcaggacctggcaggacaagaaactttcaacacacatctccttctacccctaaggccctctcatctacctgacactccctttcctctatttccctcatctcagcttcttttagcttcatctccttgtaatttacactaaatttatttctcataaaaccttagatcatgttcactttagggaaaggcactgtctcctctactgaacacctccaccatatatgtccagttctgctcatgcagtggatatcacttgctgcctagaaatgccatgttttcttacacaatctgtccttgccactagatgataggttcttaaagtaccctttaagtactgtgtctaacagctcttcaaactcccaccttataccactaatcacatgttttataaatattattgatcataatgacccaagcaggctttttgttttgctgcctcaaaagcaatgctaagtctaacactaacatctttttatgtttcaaacaaagcctgaagaattgcatcccagttggcagcaagagcagggctttcccctgtcttttaggcctgagtctccaacaccatgtcctaggtaaagggaaaggtatcaagacaaatacccaacatagctatgctgagaataggaggtctgggttccaatttgtggtccatttcctcctacccattatctgtgtctcctatcttgaatagactgatgcaacctttctccttattctgagtttctgttgctctccaccatactggacaatgaacgacacggcacctgcctttcactgaaaagaggtgaataaatacaagacgatggcatggttttactttcatgtgagcaggtgcagaagaacaaaatggacaaaagctgggtggattttgagccttgtcccctgggtctgaaaatatcctctattcactagagttctctagcattttaacagtgcttcctgcaagcaggaactccagtactggaaagcacagccctgtaggtggttttccaatagtctgtgtccgttcttccctcctgccctttgtgtggtgtattcaagggagagaggagaaagaagtgagcagtagctagcactatgatgacactgtaaaagttagccacttgttccttcaggacagggtaagctagatattctggagacattttgctcttataaccatcaaaatcatgcttagagatgggagcgttctggtgattaacagtaactcttttcatatttcataatgcactaacctctgtaagttttcatactattgataagaaattaaaacaaatactgaaaatgtgatgatctaataaccagggggaaagatgcatgcagaatgaaccctgttctcttcacaacacttgttctttgttgcagcagctgcttcccttttggtttggtcaacatgcttacttaccacccaaggccaggccatcctgcactggactctttaacttttgttagtgaggggaatatgggagatatgcccagagtttagcacagcaaaggcattttcaaacaaaaatgatcaaggcatctgtgaccctgccagaacaggaaagccacttcaggaaggtgactgtgcacgctaagctcattctctgaacccttaaatgtcatcttgtggatgtttgctgaaaaagagtctctgcctagggcatgtgcgtgggtgtctgtctttgattccctaattcaaggagtgattaggagagagaagtaaaatgagtcagatgcatttttgaaggactccctgggcaatttagcagaaggaaatgggtctcagtgttctgatatggaaagatcttcaagatatttggattaaaaaaaaatcagtgtgcgatcatgccttcattttcatataaaaaaaacccaagtcctcagctttatactatatgaatgccatgtaaacacacagaaaaaaatcaaaacttcataggaatgaactctttcttaggcaggaacgatggaggcacacaaaaaaaaaaggattttcattttgttctgcatgatatttttacaagaaggctagaatagtggcttacttgtacaatttgaaatgttaaaatatcatttaaaagaatataagaaatacctaagacaatgaatgactgaagtggcctattacatgtgcctgaagatagatagctaaaataacttctgggtaggaaaataaaattacttcaaatgacctatttttgttaatccatcagcaagccccaaatattctctcttcttcagaacatctgtagaaccagctgggcattgtggcacacacctgtacctccagctcttgggaggtagaggcagaaggaccagaaatccaaggatatccttagctacatagtgagttctaggccagcctgggctacctgagaccttatgtcatgtgggggagggggagcattcaactgcttctcacagcctcctctgatcttgcaagtcttttcctttctcccacacaggactgcagtaagtccccactcttcttcccttcccgcctctatgcctgtatttgcactatcatccttactcgaaaaatgctgcccctacactatgaaacctcactcataggaaaagcaaaagagctgcaaggtcctgcgagccccggttatcaatccaacgccatctccaactgcagacattcccagccatgacactttcctttaacgctccaggcacaaccctgcctcgggccctttggttttgctacttgctatactcagaagctctttccccagattccctcatttcccccttatttcctgcaggacactagctctgatgccaccatcctgatttccttaaacattctcatctcattttcctctttactgtgtgctgctgttaaacacaccgtggattgtaagtctcgctttgttgtctgtccataaaggctccatttgatcaggagcacttgtttgttggcttgtttatctctagaacatgtgcacacaccatccccacagatgaaggaggctgtgcccagctgcagagaccactgaagtgttggctacagaaatggatccagctcagctcaaccaaatagagatgccaatgggactgcagagcagaaataatggcttaagacctaaagagaggaagggggactgaggaaaaaaatggaattatacacaaggccttcgaaaatagcacatattgggggaataattagagggtgacactgtccagtgtctcagttaagtatcacctatccaagtatagtccctgatccttggcttctctcccaggcatgagagaatccattcctatctacactcacctatactgcttcactcatgctcaagcccgaaatcatctggcctctaatgatgacactaatgatgacaagaacatataaaggctttgcaatcaagcagacctgtgcttctcagatgtagacaaggcatttaacctcagtgtcctatctctccttcattacatatcaaataaaaatgggaatgatatctacgttgtggacaaggtttctgtgaattgatcacacacatatgtaaatatatacagctagaaaacaataggccctggataaatagtagctatggtactgtattcttagtgggtagcactatcttcatcagtttttgtggctctaactgaaaaccacagactaggtgacttacaaaaaaacaaaaagtttatttggctcatagttctggaggtctacagtcaagggattgcatcttgggaggtccttcttgctgatgggacactgcagcagagggtatcaccctctaagacatagcagattcgctggctcgggtctgtctctcttcttatacaaccactaatgcaaccatggaggtcccatgtccatgacctcatctaatcctaattacctccccaaggccctacctccaagtgccacagttagattaagtttccagcctcttaataatgcacagtggggattaaatttcaacaggagttgcagtagagacattcaggccatagcaagtaccactaatgataatataagaatgatgagccttagttcctgcagacctgattaaaatttgagctggaacatccaaattttatttctgtgctttgttatatccattccttctgagctcctaggctgcttctgtccttactgtcctcatgaactatttctttctcagaactttctgaagcccattgcccgtgaataagcaataaaacaaaggtgccatttatcttctgcagtcattttccactggggctgaacctaaggtgacaatcacacagaagaaccacagtcacatgtcatctcattaaacccaaaggaggaatccaaatgtgagcacatacagtttgttaaacgctcttggtgacctccagtctttaaggataaagacttaattcctcctggaggctttgaaggttctgcctctctctctctggccctactaattgatcacactctactcttgattattctagttaagctactcttgattattctagtatcactgaaaaaaaaaatctctgccacttttcactccccaaagacaccagggcccaagaaaaatttcagatattaaagagcactcaccaaaacgccagactgaatttagtccctaatccagtgatctcatgaagaatggagctttgcactagcatgctgctgtttattcattgttctgtggttaggttcaacatcccccacttctagacatcaagttttatgaagacagtaaccctgtgatcctttctcatggctaaaatattccccagagtttagcaagcctggacatgcaaacttgcttcatgcctgtttgtcaagtggatatagtgtcacgggtggatatgtgctgtttcaggctggtggctcccaactggacacctgcaagttccttctagagaatttgagccgttctgaggggcaaatagctatataaagaagtaccctgcagagtacaagataaatcacgtgtgctggctgaagaagggccttccatcatattcacaagactttgacttcctgctgggactcccccaacaagggacacacataagctagcaataggggtgtgagcacaggacttctgcaaagcccacgggacagccgccttcacccgagtctagcccttgccgtagctatcacaatatagtcacaagaggctagagtccacagggactacagatgacagtgtggccaaggaagagattcctaaatattgttttattctctaactgcattaaaatttaaaagctcaacattaggtttcaagaaaatttaaggaagtttgggccaatttgagaatatgtaaaaatctgcaagttttggaaccaaagacaggctaagtatttcctagtgagaattcagaacacactgtaattgttaagatcccctacattttaatgacaatagcaagaaagataaagtatctcattagtaattctaacatcaattatatttaaagagtattttagaaatatctaggctaaataaaatacataactgaaatgctttttttattttatttttattttcagtctatgagtgcttcgcctgcttgtatgtctgtacaccacatgaaaggaggacctcaaatgccctgaaactggagttatagatggttgggacctactatgtgagttatagatgattgtgacctactgtgtgagagctggtaattgagcccaggccctctggaacaacaaccaatgctcttaactattgagccatctctagtgctggttgaaattgatttaatttttttaaaactagtgctactataaaattttaagtacgactgtagaggagctgaccagatggctctgcagtcatggttcaattcccagcacccacatggtggttcacaaccacttttggctcccatttcaatggatctgagagcctcttctggcttcgaaggaacccacacgcatgtgcacaaacatacacacaaataaaaataaaacaaatcttatttgtgtatagagacatactctatgcctattgggcagaaccataagagtgctgatttagaaaaagtatattcctttcccaccagagacaactaagttttaaacagactttgcagctgtctgtatccaaaatggacaattaagagggaaaaaaaaaaaagctttcttctttaagtgaagaaattaccatactaaatccagaagtgatatcttcatgagaaataccaagattggacaaaagaagcacaatttatcttcttctgcaggagcttggatgtttctggaggcatttggagtggcaagggagtcatagatttggagactgagttttagatatgtagcctggcatagcgggtggacacagaatgaaatgaggagagtggctgtaaattgcctggctcttctgaagtacctttcctccatagagctcacagctttcacaggttctaattaaacctttcacaatagcctgcaaggtcaagaattcacctccattaggctggtgggaaaacaagagaccttggtgactagcctagggctacagagacaagcaagaaggaccctgtcattcatgcttggtcctgagaaaatgccaaccagtcaatcacaaaaaaaaaaaaaaaaaaaaaaaaaaaaaaaaaaaaaaaaaaaaactttcttcccaaagcaccaatcccatcctaaatagccccttgtccaacaggggtgagacatcctttggtgaaagactcaaaactcctgactcagtgaggtaactctccagcacagagcagattgtttaaaagctaaattggggctggaaaaccatgtccaattctttggagaaggtatgtggatcagacttgtcactcaacatgtgtccaagtgaccaggaacactgatgtatttgagaccctctgaatgacatggacaccttcacaccatcccaagagtttgaaaatcactttaccatcaatgctgtcagtgactttgtaccctttcctgtctcccctctctctctctctctctctctctctctctctctctctctctctctctctctctctctctctctctctctcctctctccctctctccctctctccctctctctcacacacacatacttctaaaattctctatacttacttctctataaggtccttagttctacctctccagtaacacagtttacacacagacacagacaccacactctctctttcgtgcaaattgagcaccccactactcaagcacctaggaggattgagcacatgaatatccctacaccagccacggctaagtgtagagcaggcatctgtttgaggagacagtctgaatgtggatcttaccagcatatcaaacgtcacaaacatcatacatcactagcaaacctactgctttcaccaggtaatatgtttattcctgtatccaaaccacacgatgtcctgctttgctttctgctgctgttacaaacaccatgaccaaaatcaacttgaggaggagagggtttatttcatcctaccacttaagttccatcatgaagggaagtcagggcaggaactcaagtaggaacctggaggcaagaactgaaacagagaccatggagggtgctgcttactggcttgctcccagtggcttgctcaatctgttttcttttttgtttttgtttttgtttttgtttttcgaaacagggtttctctgtgtagctttggagcctatcctggcactctttctggagaccaggctggcctcgaactcacagagatccgcctgcctctgcttcccaagtgctgggtttaatgtgccaccaatgcccagccagaactagctcttatagaccaggctggtctcgaactcacagagattcacctgcctcttcctcccgagtgctgggattaaaggcatacaccaccactcaggaccacctggccaggagggacaccacctacagtgggctgggccttcccccatcaatcacaaatcaagacttgcccacagtccaatctgatggaagcattttctcaattgtgcattcctccttctagatgactttagcttgtcaagttgacaaaacctaaccagcaaccccacccccacatacacaccacagtttttatatttaaaaaaaaaagtacaataaagctcttatttcctttatcaatgctgtataggcaaactaagagcctggcaggacctccagacctttgtgcaaaacatcagtagctcacagatggagggcacaggcctgcagcatgggcagggggtctcagccccagccccatgtagaagtcaggtctattttaccagatcctcctatttcctaaggagaagctgtaaatctggagttttcatatgaaatttctcattttttaatcttggcaactaattgaatttctttaaacaactatgcaggccaagaaaaacacagcttcaggccaagatctgcatataccctcctgtggagtgtgcatgcattcaatatccctaagaacaaagtctcagaagagtaacttaaggtttaatttcagtgctcagctatagctcacctgggaacatgagtgccaccacactcgagaccctggattcaactcctagcattgaacatgcctataaccctggcatcccatcattcaggaggtggaggcaggttaccctcagttatagaccaagttccaggctgggatacatgagaccctgttgaagaaaagaaagaagaaaggaaaagaaggagggagggagaaggagggagggagggagagaaaagggaagggagaggagggggaggggagttctagaactttgtcttactgtcacatctttctgtatttcccctttataggctagtcacacccataatctgataacctttggtttattctttttctctataggttctcctcttttgagaatatcatatgagccaaagcatacagtttgtagctttctgaatcttgctttcactcaacaccatgtatgtgaagtttggtcttgttttcacatgtcttcatcctcttctgtgactgagtagctttcagctctgcagaagcatcaacagtttatctgcccgttaagtaaaggacactcaatgactgagctagacactatgaacgttcacgaagacatctgtttgtgaatatagtctccatttctcttgggtactactaaaatgttggattcctgggttccatggtaaacacatgcttagcttaataagaaactcttctgtgggcctggggaggtgcacacatccactctaaaaatacgtataccacatgcacaacacaacacacaacacacacacacacacacacacacacacacacacacacacacacacacacaatgtttaacaagaaaagacactgttttgcaagtggctcaatagtttctgagagtgcaccccccaagcccttggcatatttgccatcctggttttgccctgtttcattgttttttagttcttctgatgggcatgtggcccacacctacttttgatggattaaagcaaattcacagaacgctgtcctctaaatccagggtctctgcataaataattgtgatttctgacataatgctctgtccatgtacacactaccttacctgtcttcagtaaatgcacatgtgtcattaggtggatttttgaaaattttatcctattcaaatcccccaacatgactgatcgccactctgctagttggccttatgcaatttcagtaagtgccaagggggtggggggacacttcgaactgctctttcagcagctaaaaataacgctgaaaccaatgtaagcacataagaagtgctcagactcgagttacacattaacagggtttggtctggccagagcagagcacagctccagagaatttcacttgttgctattgccaagcctccctacctggaccaggcaggattgggctcacaagagacctttagaaaagatgcagaaaaacaagcagcatgcacttcctggcaatgaacgtaaaagtttgctccaacattccaaagattttcattcaacattcctctggccaacacatctgcaacctgccagcccttaaatatcggtgtttttacatctcaatctcacaaacatcttggaaaaggctgtttctctctgccttcatgtctgatgcatctggcttttttccattttgtaaaaccacagaaatgtgatgctgtttacttccaacaagaccaagctcaccggagttcagacttatttccagagcattgacttggttcattctgcctttccaggtgatcccattcttgaaatggtaccatgactttattttttcatcacagaggcctcgtgtaaaattagggagctctgatgttaaattatacgaaagcaaaatgtactacaaagggaagggttttccaggtcatgtccttgagtacaattctttaccctttccaggataaatcaccttttgctggatggtgtaatacagtggttctcaaccttcctaatgttgagaccttttcatacagtccctcgtgttagtgttgtggtgacccccaaccataaaattattttcattgctacttcataactgggattttgctaccgatatgaatcagaatgcaaatgtttttggagaaagagggttgtgaaagggtcacgacccacaagttgagaactgctgggataatatttcccactggggtagtatgtgcttttctcctgttaatgtccatcacatgacttgctttggctggtgggatgatttcagaagcaatggttactagttcagtgtctcagcttcaggagtcctcatgtgtttctgccatcaccccaaaatgagcatgacctaagttgttcactagtcccaagacaatgatgagagacaggagctcagttagatactatagctcagctacttcaagacctacatctagaggtagagctgcccagccagctcagtctagatcaactgacccacagccaacacaagatgtgagcagtaacaaaatgtttttagctaccgagctttggattggtttgttaaacagcaaaagataaatggaatgagcaccattcctgagttgttttatttattttaactgaagaaaattaatatcagctactccgcattttagaacactgtatgcctttcatatagggctaattcttaagggttctttaatacagttgtagtaagtccagtatgcttataaccacaacagttcaagactaacctatacaacatagtgacattctgtctcaggatagagtaaatataaaaaaagaacttaggggtggtccagggttgatgggaggaggtctcattcagcaaacaagtcaagccttaaccatcatcatcacagttgctgctgtagcctgtcctgtctccagctctccctccatttctacagctgtggttctcaagcaggggccacataataatatgatggtgacaggatggttactggcatcaactggatagaagccagaggctctgctaaacctagcaacacacaggactacccacggtggcaaatagtagtcaaaatccaatgtcaataatgccaaggccaagaaacactatcctttggtttaagttcaaatatttattgattcttccctcttataagagtatgtcagttaaactctggggaattgtataaaaaaaatttgtttcttaaatacatttaaaaaaaacctttaaaagcccaagccaacttctctgtatataaagtgaaacgtacatgaatgcttactttattcaaagtgtaaatgacttgttcacaaacaagaaatagttgacagaagaaaacctttgtttaaatatgtctatatatctacaagtcattactagtatgtcaaattatctgtcaagaaaatcccattccatgtcaaatatttgtaactaagtaaccaaattggcaaaggcatccattcctgctgaaccttcccctacctcaagggcactccagatgtacaaagcagcagttaccatggcctgggtgtggggccattttgaatgaaattgctgtattataacaatatcctatggtgtcccagtgaccaaaactctttaatgatgccctagagagtccatattaatactaaattccagcctcaaagttttggattcgtaccaagaaaaacaactgatccacagaatcaagaactgacgagggtccccagactgctgagtcaaccatggttgaaacgtatctcttcctgagaacagactggatttggtctgaagcaatggtgctgacgaagatggcatacatgcgtgagagagctcttagtgcattgatgcatgtgacacactgaatgaaggtattttggaaggcgtgggaaattgaaaaatagaatttggcaacaaaggagaaccaggatggtctgctccaagatttgaggggatggcacagttcaaatcacaggtgcaaagccaggactaggctaatagaggtccagaaaggaaaacagtaagatcagagaattttcataaccagcatccaaaggaccaatgattgctaaaaacttgggttccaggatgatcattcttcagtcatgctctgtggggaagtcaaagcaagccactgaattcccactggtttcaaggattaagatagagtcaaagtctatatagcaaaggagattgcaggccccagggaggaatttactactgatattctgctaaatggacgagtgggcagactaccttctaaagatttgtgtctgtacacatacatcagtgctgttgtcagcctggaccagagaagcttccttttgcagagggcagcagttaaagcaaacattcaaaactcatcaaagtaccgagaataagtgattgacgagtatgcaaaccctaaagcgaacatctctgtcatcctccccaaggcccagggaccatcattaaagaagggatggaaagactgcaagagtcaagggaaggagaggagcactgtgaaataccatcttcatatgacatggccactgtaatcatgaacatacagcaacagtgactaacacacacacacacacacacacacacacacacacaaagagagggacattttaggaacaggaagagtctcagcagaagtgggaggggggaaaagtgtaacaggatgaagatgagcataacccattgcatatacataacggaatcatcaaaaatagaacaaagactgtgggagcggcctaccgtagcatgaaggccgaggccttttcattactaacttgtggctagctttgctgggaaccaggtatatttggcacatacataaaatggcagcactttcataggctggtgcagtgcactctggcctcggcattcattaggaaagaactgagagagcaaatgtggaaggccctgaactctccactcctatttccagcaggacaagctccactttatttgttctaaacattgtcactccaactgctcatctccaaacataaattctgctgctgctgaaacaagtttggaaaacgacgtgttaagaggtcgtaatcccaggttgggaaggcacattgctgaagcaatgaaaatgatccaaccatgacccaggtggcaaggctcttggagagagattgcacattttctgagcaaagcaggcctgtgtgctagagtgtgtccctctggctttgtttattttggtacccttgtataacttacacttttaacgaggacatttttattttttgaaaaatatttcgtttatttattatgtatacaacattctgcttccatgtatatctgcacaccagaagagggcaccagatctcattacagatggttgtgagccaccatgtggttgctgggaactgaactcaggacctccggaagagcagccagtgctcttaacctctgagccatgtctccagcccatgagaacatttttaaatgaaatgggattttaatgagcagtggttcacaaccttcctattcctgagaccctttaacacagctccttttgttgtggtgacccccccagccataaaattatttcattgctacttcataagtataattttgctactgttgtgagccgtaatgtaaacgtttttggagattgaggttttacagcggggtcatgacccacaggttgagaaccactggctttaagtggctgtcgcaacttggatggcctgaaacaaatcacaatagtcattctgatgaaagaggatatttggctgtgctgacagcagatttatcagacgctatacgcctggttcttagcattgccgttgatgtaaattgctgtggcattcactaaaaagaaaataggaaataaatgtatataattggattgaccacccatactagggtctgttttatccacaatgtggggaagaagggcagctgccttcaatgttgttggatggctggcacggctttatattagaggctctctcttcccttgaggttgaaagcagagggcagagtggggacaactggagatgttccaaacgaagtcgctgaagagacaaggtagcctagttttgtgccattgcttgaggaccgtgaccaggaatcgatttgtttatgttgtcaacacttctccaggcctattagacgctctagcttttagatgcatgcatttgtagccctcccttttaccactgctggccgccactacatcccaattccaaagccatccatattctatttgggtgatagttagcacatctaaccacttcatggaaaaaccaacaagaggaaaccaccaagtaagagagaaagtaagcttattccaagttctggccacttcacaccttgtgtttgttcacggagttggccacaaagttcccttctgacagcctcatttacagctctccttgtgctgccaagttaccgcccagtagacttctcctgttacttcgactctgcacccaccgacagcctgaagcgttcaacaaaaaccctcagattaagcaataagatgacccacaccaggcacaaatatctctctacctgtcattcagtggccgcagttggcaactaacaatagtatgagcagccaagtaattatagagagggagtggtggattctgatataaatgtttggtatgttgtgtccctggagaactaagctcctggaggtcaggaacagaaactgtaagaggtatgtgaactaagacacctgagttaaatatcaaatatctgtatcttgttcttgaacgagtgttggatacatcactaagggctatgcagccagaataaatgctgtaagccaacaagcctccagcatcagaatcagacttagaagcaaatacagtagccatctctacatagtagaaacagggtcactattaatatcttgctggttggtgtttctcattttctgctgtaagtatatatgacttttataattagaaaaacataaatattgatagaaaagtgcttggagtcaggattcaaaggaccatatcaagtgacaagagtcatgttctttgtatagcacccacctcctctcactcatcctcctatttgcttttatttaataaacaagcaaaggggttggatatgtgaggagcacctttctaagcactggaaacccatcagcttgtttaagtttcccgttgtgtgaggtttgctcacagtattctacagataagaaacagaagtgcagagagcctaacttactggcccaggatgcagagccaatgagcaacacaatggcaatcttcctaaagctggctcgatttagtgcacttcttggctctgctaagctgcctctaccttcctctgcttcagataggtcttccctatctctcaaatccttttgtaactttgccatgccccaatgtcaatgccagtgtcagatcaggatagacagcccaaaggagctttgttttgttttgttggagatggtcccagatgacatggaactcctctctttgtagctcaggctatccttgaactcctactcctcctgcttccacctccaacagccactggttggaagcatgcagtacacatttccactcaaaggagcatctaagggagactgacacctctggacagacagagaaatcagtctcagccttagggtcggaaagataaacatgttcagatccagacactcagaggtatccataatcacaagagataaaagacgagaaggaccctgctacctggaaaacacaacctccaaaccacttttctcctctatctagcgtagactcaaatgaaactccttgaaagtattttttctgcttgctttgtccctgatttcccttttttccaccaacgcccagccaaaagccccttcttatttgtctaagatttctctgagggccctttcaagcatagagcttgtaactctaagaagtctctgggtgtttgccacttacgagggcagcatctttgtgaagctgaagctaccatctatgacattgcagcttcctttggttcctgaggacaggagagagttggccctttaatctccatcttcacgagtccagaacatcagtgccagccattgatactgggagcagatgacaaaattgggctaagttttctgggggttgcatctgtttgacctcttccgcgcctgtttcttccctgcacagatggtaccatggaggctgtagacctacagaggaaaggcatgaagcatgctgggataggaaacagcaagatttgtctgggtgccagactgagtcactctctgtctttcatgacccttgcctgtgtcctgtgccatgcatcttaatcatccttcctctcacatgacaagaatcattaaccaaagtagattcaaaaaaaccctgacgccattcaaaatgcatggaagctgggtatgtataaagccttagaagttgctcagagctgagggtcaaatatatgttgagattaggttgaaaataaaggcagtttccctgagacaatcttaactgacacctgctgcccaggtatcaggtcatgtcattttactttgttttggatgtttgagacagagtctcatgtagcccaagctcacctcaaactttcattgtgaccacagatggctttgaactcctgctgctcctacttttacctttggaagactgggatatagacagggccaccatatctttttcattcacagacatctcctataaatgataaggggaccgtgactacaatgtgagaccaaagtcttccatgctgcagaatctatatatgccaaagagctttcaacccatgcttcccaaagctaggaaatcccttggaaacatcatgacaaaattttcactccctgctttatcaagacttcagctgctatgcgtctgtctgttctactgctgtggttcacagtcctgggactcttcattgagtctatgagggagaacaagttgttacagtaactctatcacatactgtagagatcctgagaggaaacgaggggacttgtattgctgaaccccaattgtgtgtcataccccaagatgagatgctttctctccttgtaggagagaaatgaattattcccccttttaagaatgagaaaattgggcctggaagtggtggcacacacctttgatcgcaacactcaggagacagacaggaagatctctgtcagttcaaggccaacctggtctacagagcaaattccaggacagactccgaagctatagagaaaccctatctcaaaaaaacaaacagagaaaggagagaggaagagataggagggggggacagacagagagagaactaatgtggaggaagaaagaggagagagagagagagagagagagagagagagagagagagagagagaactgtttgtggagaggtacaagctaacacaggctggagttcaagccctgagatttctgaagatttctgacctagaagcccatcagttactctcatctgagcctgaggcccccccccctgtcttctctctatgcctttcttcactgctgattgaagtgaggaaccagatgacgtgacagatagctcttaccccttataccagacaccctctcccacaacctgtcacatccctgcactttgtcagtgaaggtaaagacagagagtaccactacaaaactctgggaaaatctaccgctctcactcaagtgcctatcttgtcccagctcagatttaaaatgaaatgacactgaagaacgaacaaagttgttaatcattttcatgttctcattcgttctgagggaaaggcagcctctgtgagagtggaagaaaaggggagctaggagctgcttgctgccctggagtgacactgcacggttggttgcatttcctgcctgtcatgtcacttcagagcaattgttctcttcagcaaaaactctccagagagtctcaaagacagtttctcttgtgactggccatggccagtgtctggtgccctaagaagaatttctccatctccgtatgctaaaaagagcttcccagaaaaggaaggatgcagaggccatgagggagcagaaaggttgagtcaggtgtagattagaagaaaggatatgtgataggtagggtttttagttggggggggtggtaggggaggaagggagggagaagggacctaggattgtcatgtaattcaatcttgtttgtaattcaaatttttaaaaaatgtaaaaaaaaaaaaagagcttcccaggcatgtggcagggggaatggatacagtgacaagagagtgacccccaaaagaggcaccagaggaagcaactgactggctgatacccacagagcagctcaagtcacatcttattgagattcagaggtgacaaaggccaatatgatagaaaactaactttgctttttctgctataacaaaatatctcaggctaggtggttttaaatggaagcttattgactcacaattttggattctgggataaccaagagtatagtgtggcatctggtaagtgtgtctttgctatatcccaacatggtagagggcatcacataccaaaacacagcttgggtttctcttccacttagaaagccaccagtgccagcatgagggccttaccctcattgcttcacctgatgtcaattgcttcccaaaggcaacacctacaaatgccattaacatatttattgaggattatgtttccaacataggaactctggaggaacacgatcacactatagatagtagaatatgtcacggaagaagagtgtagagagacaccataaccacgcctcctaaggtctggctacagatgtgcctgaccacacttgtcagggtgtggtcaaggtgatgtcagggtgatgtggaaaaaggtttaaagggatagccaaggcacatagtagctgtcttttctctgttgcttttgctcactccggttcctgtcggttgccattgacctattaaagatatcctgaccttatggattacgtattagttattcaccataatagaagagtaaggaacactggagttaaagaatcagataggaataaatgttagaagatggaagagtagccaggaaatggtggtgcaccctttcaatcccagcacttcggaggtagaggcaggtgggtctcagtgagtttgaggccagcctggtctacaaaatgagttctaggacagccaggattgttacacagagagaaaccctgtctcaaaaaaacaaaacaccaacaaacaaaaaagatggaagagcaggcgatttaaccaaaactcaggatgtatgaaaaaaaaaagcattatagaaacctactagttagtaagtgaatctctaaacaaaacgttttgaaaaagaattagaaaagtatcctacatggatagacaaatgttgctcgcagaaggcatgaaagtgaaatcacagtgaaggtatagaatatctccctatgagttaatgtcagggaggcccagagtgctccaaaacaacataggctattgaccttgtccttagttattcaccgtaactacacaataagaccctatgggtgaagacaccacatactttggttgcagaacatagagaaatcaatcacaaaccaaccaagaaatgtccttccagatgactagcttatacactgccagaaggtgttatacaaactaccaggagagaaaagacatcaatagtcctacccagctctggaccctctatgctacaatgctgacctgccaggcaagatgcacccactggtgtaacagagactccattgtataactgttttcaattagatttgagagctgcttctcagtagggaatttcatgcctggtactgaaatcctggtcaaaagccatggctagtcagatcagagaccccagggtagaagctgctgatgtccctttgctcaatggtcatactgccaaattgccttctgaacatgtatgtttatacctgaatagctggttactttcaaccttcggtggagaggcttcttttggcagtgggcaaaagtcagtgcatagacatggaactggtcaaagcactaggagtaagaggctgtgggtgtttttcactatgacatttatgtcaacttccttccctcccacacccaagattcaaggaatatcaaagaggacaaagaaggaaggatgaggtataggatcggaaagaatgttgtaaaattctctcttctagacatgacaagactgtcgtactcatgaactcacaccagctatggttacctgcataggatctatacaaaatcaaggcagccaaactcctgtatagatggcagatgcactctccaggccccaccctttaatgaggaactgttgacagtcgatggctgctggaggagagagaatccccctttgagggtgtgaccattgatagatttcccacgtttcccagcatttcctacaccatgcacattacaacagtaattggacttaatgggctatcacatactcaaaaaaaaaagacctgctgtttggaggaggagattttgggaagaatatggaagtttgaaaatattcatgaatggttggttataggttctaaagatatgttctacagatattaattcaatatattattgctcagaatctactacatgaaggtaggcaagacaaacctggttcctagcttgatgagatgttcagtatcataacagaccctgtatgtcccatacctaagtcccaccaggaggtaggatttacagtattgcttagtagagagaaaacagcccagggaccttgtttaggccccgttaggtctcagggcaacaattttccaaaggacagtcattgtactatttattatattgtaaagatatatttagtaattacttaacatttatatcatatcaaacctattattttgtgagatttatggcttaagactagacaatgtaaaaatagtctaccataaaaatagtctatccaggccggcctgacccctaccgagcgccctcatccagtggctgatggaagcagaggcagacacccacagatatatacttaactgaactctggaacttagttgcagagagggtggaatgaaaatcaaaggggtcagtaccaggctggtgaaacccacagaaacaactggcctgaacaagggggagcacatggaccccagactgctgtctgggatgccagcacaggactgatccagacccctgatctgaacatgggtgtcaatgaggaggcctctgcactctagggagcccctggtagtagattagtatttttccctggtgtaagaagggactttgagagcccatcccatgtctcggcctggacacatgggggagggcctaggccttccccaggtagactttgggagcccccatcaagggccatacccagcctggggagtagagggtggaggtggaggagggaaggagagttggggggaggggagggagagggagaagggattgacatgtgaagcaactttgttcctaatttgaactaataaaaaaaattacaaaaaaatgtatattccagtaacaatgtcaagaattaccctttttgatcacatctttgtcattttaataggcaaataaatgaaggtatcatgaggaaaaaaaaagtctatccaaaataatattaaggaaattatcatgttagtagcacaatgagacagcaacatttgtaatcaatagaaataatggttgtggatcactgaaataacaaatgccaaaactaaaatgcacatagtccatgaagatagtagtggctctattgatccctcattggacttttgctcacccatccactcaggccatgagctaaagcaactatggtacaaactgcaagactctggctgtacaggctcttgccaagccttcaggaggcagtgtgtgcaccgaggccatgggggacctcagcaggaacaggatctggtgcctggtctgaggaaagtataatttaataggaaagaaaaggcaggcatacaaataactgtaaaatgggataagccccaaagagcaggggtacaaagccccagagaggagactcaaaggagggataagtcacgcctatggagaaaggtcacaaaagacttcatggagatttgagatgccatttgagataagctgggggagaagggaggaatttcaaggacacaaaagagggggagaatatgaaacattccagagagggaccagtgcttgagcgacggtacagagagaccaggaagtgacaagagggtagaaagtccgttctgttgattcagctggggtatagaatgcagctcaagcagatgattagggagttcagagtgtggcccaacactagggcagagagggaggtcaaaattagcatagaagaggagccggttggcagagaagaacacttgaacctcctcctccacatgaaaagtgtgcgcaccgctaaacactaacctttccctagctctggcccacttcctcccttgcaagtacgttcttaataaactctatctggttctgctactagccatatgtctttgtctgatcttttttgttctggggacacaaaaccctggaaaccccaaagggtgtctgctggaatcgggtaatgttaccaacaccaaagattaatggaaacggcagggtgttggggcgggggcagtgaaaagctgaaaagatgagtagagctgcctccactagagtctggaaatgaggaaaaggttattgccaccaaggccctagttactgtgacttcataatgaaagcacaatacagtgtgaatttggggactcaaagtgattacactggggggagattctttaagacctgggaattaatttagagtgggagagagacaggaaactcccaggataagcagataacaacagctctctggcttctcagacatgccgaggctgtggggcagagagaacacttgcaagtgatgtgctgcaaaaaaaaaaaaaaaaaaaaaaaaaaaaaaaaaaagtgccttaggcatccatgctggcctcagaaaggccagccgtggcccaaagaagaaactaggagtgactagagctggccaagtgaatgatctttgtgttgtttacacatacaaatttagggacagaagaaaaaccaaaatgaaacataccagacaccaacagttaattataaattgcttccgtgtacaaataagagggttttttttgtttgtttgttttttaagtaaggaactttataaggtacttaaattactcccataagcagctgctaacaacatcaatatagaagaaggccatgttgtcactgttgtggttaagaactctaagcattgcagaaccctgtgaaatgacctctaaaatatatctggtcataactcctaaaataatataggtatgaccttattccagacaaaagggacctctgcaaacgtgggcatcttaagaatattgagatgtgatgtttatcctggattattcaagtgagtcctaaatgctaccacaattgtccttattcaaggaagatttgacaccaacagagctgaggagatacatggagaattcaaaatggaaacctagctgttctagttagctttaatctgtcagttcaatacagcttaggaaagcttcaactgaggaaatatctagatcagactggcctgtggacatatctgtgggattgtcctaaataccaattgatgttgaaggatccagtccactatgggcagcaccatccctaggcagatagtcctggactatatacaaaaaccagctaagcacaagcctgcaaacaagacaataagcagcattcctccatattttcttcttcaagtttttgctcaaatccctgtccaggtttctctcaatgatggacagtgactatgaagtgaaagccaaataaaccttttcaatcccctacattgctttagtcacaatgttttatcatagtaacagaaaagaaaacagaactctaacctgaagatgctggccttggagatgacttccagcttattaagccataagacatggataccaaaaaccaacagaaactggcagaggcaaggcatggatattacctaagacttccacagggactatagaatgccttcgtgaagttgataccagacttctggcctcttgaacaaatttccgttgctttagaccggtgaatcagtagtcatatatcctaacctccccaagaaaataatggaggtaggaattctcattgaattccttcttttcaactgagatgccaccagaagcagccacacaacatcagatgggctaatgtttctctgggctcattttttgttatagtgtgaactgataaatcctgccttatgaagttactgccaggttatcagagtgaatatacctgtgtcaagtcccagaaataatgtatgggattgttctctacctcggggtatccctaccctctgagcaagatacaggaatgatgcacaaccaaatccataattgatacaacaaataccacaaagacgccaagtgttttgaagctcctggagtaaggtgtgaagagtggagaaactcggtgcatggtgggaatatttctttagcctttgtaataggtgagacactctgttgggactcaaaggtctgaagaggagcaattaatgaacttattctgtggaaagcttgtagtcaaggccagcatgagtcaaagtacattaatggtttgaaaaatcctcaaaatcccattggaagacttaacgcacacggatgaaatgctgtactctatacctgtccagtcggttaccaacctcttcctacagccacaccttctgaagacttaacgtagccattaattcattgctctgagtccagctaaatctggtttgacttcagctgtcctagctttttccaacttctctgatgtgcactaactatttactcttgggccaaaaactagacttgtgttctcctccttaggttgtcatgatacttacatgtaataattattgagagcttgagaattgtgttaggcataataatccctcaaaaggtgagtacaaactccagaacctgtgaattggttacctgtgtatatgttacctgatggagcagagaaactttgactttcttctaggtcatctgggtgggcccaacttgaccacaagaaccctttaagagtagagacaccttcccagctggtgtcagagacagactgacaaagggatgaagagtgagagaaaggggatattgctggctttaaagatgaaaagggcaagcagccgctgatgctgggaagggcaaaggacagagtgtctttccttgaacctggggagggaaccttgcatgagctttctagaactaggtctgctacctcctcctctggcagcctgttgggctgatagtcactaaccctgtaagcgcctcccctgcctcaactgatataagagcaataccttgccatggaggggaaggaggcgccatcacatctcacatgcatcattgcttgctcctcatgagtgggcaggtcagttggaggtcctttctgcttctgcaaaaatagctaatgcagttaaggactaccaggtcacatcccttcccagctcaaacccttccagaggctccccagctcactcccagaagggcctgaaagacttcctgtgttctcaagtcttcagggcacatctgaccccatttcccctctgactgtctccttcctctctgacccttgctgactgtgctccaagcccactggctgccttgctgttctatgcacactgggagttgcagcctcaggacacttgcacttgatatttttctctgcctaagaccctcttcctccctccgaccagcttgctcccttggcaccttcagatctctccgatgtggccttcctcctgacagtcttgttgaaatagcagtgcctcccccaccaaaccaaagcaccacagcaatttcctcttctatcatgaagcatgtttaatttttttttttttttctctcatccaggtttgtctctttggaaatgtaagcttcatgtgggctcttcatgaaggacacatcaggtgtttgataaatatctgtcgagtgagcaaaatcagtgtgtagtcaaactataatcaagaactaaatctcagcattgcctctcattaatgacccctccattcagttacaaatgggaaatacaagacaacgatctatctgtggttgaacaatgaagctgcagctaagatcaaactcttaattggccttgctgagcccagaccagccaaagcagtggaaatgccaaggtgctcggcacccagccctgtctcctagacaaagaacgcagagaggcttggtcttctgaagccttggcctttctggtttcagccagcctctaaaagccataagaacagtttgtctcagtacttcagtacttccgcttccaggctcaggaaagagcaggaagtgcaggggcgtgtgagaaaagaagaattaaagccactacatgtaaagggctcagagacttcctctgcctaccacagcacacgctgtgctttcacagcgagcctagggacacggttctcaggcaggaaagcagaatgtgactgctagacccctgtcatccaacacaaacctgttcagggacagctgaggttgtggcagaagacagccctggtccctgcccatgtgagtttacctttcacaggtgtcttaacattacaagggtcaacctagttcatatcccacctactcagtgtttgttctgtgcaggctgagttcccagcatgcccccaggaattaccttagattataggggactgtctagagtcgatgtaaactagagagtcaggccaaccaatgctccagtcttgaagctgccacaattagtagccgaatgaatgccagctccctacaggaagggctgtgtttatctcatttcccattgtatccacagcattgcccacataatgcccaatatgctcaataacccctgcctagaagaaaatcaattttagcagcctcggtttcttcgttagtaaaagaaaactacaaagcctgcatcgtgtagctgtctgggcatcccaaatgaacgggagctcccctcctctatagggactgctacttgacagtatttgcttaaggtacaatggtagcattctgaaggtaaaaggagcggttagcgctggatgaactgtaggcatgctgaaccccaaaggttgatcccaccaggaattttagactctgccgggacctgaagagttgagtgttggagtgatcctggcctctggaaaagtcctgttccacttctgccagaaacccccggaaaggggaagagtgctctccacatcccagctgctcaggtgatggccacagaagtgaaacaacatgactaagcacagccaggtctcacttcgtcacatgagagggggaggggagagcacttgggagtattcaactgtaagtgcatagtgcaaactgagggcagacagctgggccagtgtcccactcctttctctgttagattcttacagctggaggaagtgtggggtgtcttttccttaactgcaagtcatcctgtgcctgccccacacaccttgtgattcagcagcctggctcagcagcaaaggaaccacctgtcagtgttcagagatcaaataaaaaaataaacacctaagaccttcctagaattccctaacccccaggaattcttaacacttttacttcagagggttcagctcacaacctaatcggttaagaggtctggccctccgtttcaagctgagctgctctttctgcctttactaatatttctcatggtcacaatgcaatatgggagatctcttccagaagcaagggcacagagactcaaacttaatgcccacgatgttggcgaaaatgtcccatttgtccagcaatgagcagtcttgttgtcaaccatttcagaagagtctgctgatacaatgtgtttgtcatgagccactgcagtggaaaagggggactgtcctctcaaagaaacagagaatgcaatgactcaaatgatctctggctgttcccactgtcactagacttagtcattcatgttgcttttgtcttatttttagacacctagctttaaatctttaaattaaccgctctgatgaacagcagcaatttggttagtaatgagttcctttgatttttttttccctccttcatggtggaagatactcgtgagccccacttttccaaataactaataaatcttcatagtcttcctatgaagccattatagctatccagagaggagaggacacatctagaaagctcaggggaccaaagatgtcaagatgtccgtctcacaagctgcattcctcactcttcacccatcctttcactggggcagactgtgtatgctcactctgtcagcactgggtggggtgttaggaatagagagctgaatgggacaggccagctttctgtaagtcagcacacccactgtctcaaaggatgacaagaaacccaccaatcagagaagagatggaacagaggtcagcactcccactgtctcaaaggatgacaagaaacccaccaatcagagaagggatggagcagtgggccaggtattcagcttcagctttgctttgttaaaggagaaaattacttaagccatactgggtgaccctgttgctttcaaaggagaacaatcatgctcatcttcctgaagccctctgaagttacacaagtaaagttttaggattttagaaatatctcctagtaagggttctagtcagctatcatcttgagtcaatgatgctgcaacttgacttaggaaaggcaagttcgcaacttcaacagcctagctgtaagcaaggtgactcccctacctacttccccctccctaggtatgaattgagaaacccagaggtgaccacagtcctgggcaactatgtacaaaaatgggaactgacacttgataggccctcccctgggcttagccggaatcatcagcctatagattcaggaactaagtggcttgaccattttgcacgtaagccatatacgttgggttaaaggagacaagtgagcaacaattcaatttagagttcactgaatcctctggtttgggaaggaaattgccggtaatcaattgcagcaagcatacaggctcagggccaggaagggaaaaatcactttaatgggcaaagcagatgttgctaaattcattgcaaaagtgcgatgggcacagagccaggccttgcatgtgagatgctgatctttcctcctgaatgaacaaaacagagacacttcaaagcaggggctaggggggagttccatcagggaagccagaggtctgggtccccattaagctgaacaaaagaaaatgcagccaggtgttcaggtctcctttatcaccacaggacttaaagctgttaacatctcataaggattttaaacaactccagaatacgggcttaaaactccttgggaagtcttattctatcctaaagggctgtgtggtagagtgacaatgagacaggttttccctcccagtatgttggttccttcatcagggtgttgtataaattggctgaagcaattaaccttcagtacaatttttctaatctgtcaaatgggcttaacctagttaagggcagtagtggaggtcagtaaaactgggtgtaagtacagttagggggtgcacctaaacagtaatacgtgaaaagaatggcgagactaggagaaatgcttaatgacccagggggaagagcaaacagggctacttgggattcagtattcactagttttactagtatctctcagtgaaggctattcccaggccagatgcttgtgtgttttgatcttcaaatagctctgaggtatatgataatcagagacaatgtcatcatccatggaagacattctatgcttagaatgtcttcctatgtcttctagtgaaacctctgtagaaagacagctgattctcgctccccaggtctgaaatgttctttatgtagtttccactccttcacatcccaaccagagtgtcttccccaagagtcaccccagattcttttagggcatcccttcctattcaccctcacccaggtttctctcggctgccttaaatatctcctggaaccagacttctaatattaagcctatccattaacaactgaatcctacctgctttggcctacagccgtgaattttcatacaccaatgtgatatggtatgggtctcctccaaatcttttgtaacgtgctagagtttaaacactgatctttcgttagtttcactctccaaactagacgttgacaaaacagagggctctgttttgtggccaggtcatatcaatgagaggcaaggtccccgcccttcctaagccttattagcacctccctcctagggctccttggtgtgagcagtccgtgagctccgtcttaggaagggctgagccgcctcataatacagctgagtagtaacagtcggtcgcccaggagcttcttcacaaggcagtcatgtgggaagaggggctaagccatgcccaatacaaagaaccccaaactgcattcacattccttgagctttccaaacctcaggctttttccaccagtggccaccctccaggaagctgtgtcccactaaaagcatgtttccaagttgccataagcattagaatgttcctgataagcaagcagagctgcagaggagctttgccagtggatttctgggagctggtgaacgaggatgtttaccagagcacagagcacagaggccaggtcctcagtacagaatattttggcctagatagatcctggagaaggagctttttttttttttttttcccaagtacagactctgttctcaggtcctggagtcagcattagaaactaaacaaaccttccagagttcacatttgtttactttcgaccaaatgcaacttcctgtttgaaaggaaaggggctgtaaagctttctatagcccttcttgaacataatgtctctcctaaaaacaatcgatttgctaagcagaaatgaatcaaatgcacacaatggggatctcccttctcaaaaatgctcgagttttaatagggaaagtgctccgcaaaaccaaaacaaatattttttcaactgttggcctgcgaggattgtttaggccatttcttctcctgagaacaagaaaaacagacgtcaggagggagccaagctacatgtgctgtgtcagaaaagtcactttgacacacttgggggttgagatttcagttacacagaaagtttaagttcccacagccactcaaaccgcattcctagcatgagcaactgtgtctttcattatatgacagtgtcccaagtcacgtccttcaaggtcctgaaatccccttgaatggtagcaatgtttggaaatggagtgacagcccctagaacaaagccaccacaatcttttgacaagattttaaacaatgcattctgtaatgggtgtggaaaatggggaacttctgtgattaatttttagaggatctcaaagttaacgaaaaatcagaattaagctcggatttatgtataatgaaactccttcccacaaatcttgaatcttttttgttagaaaacattaaatttgtagaggaccttcaaaccatctggtcaacctcacccttccaacccacccacaaatcatagctaaagtaaatgagcaatatgaaggtgttcagaagcctagacataaatttctttgttcttaaggcaagaactatgtcacttttcccactttttaatgtaatactatgaatacagtaaggactctaggagaatgaggcgaccgaacacactaaagagatgtgaagtcaaggtcaatatacaggtttcccagcaggttcctgtgcttccaggtctagccctgttgaccctctaaattgaaagtttcttgaaagctaaaggaattcatgcatagttcttacagtggcttaaatgagaatggccccataggttcatgtattcgaatatttggttcccagttggtggactgtttaggaaggtttaagagatgtggccttgttgaagaaggtgtgtcactgggggtgagctttgaggtttcaaaagcccacatcaggcccagtctctctctctctctctctctctctctctctctctctctctctctcctttctttttctctccttccctctatctatctatctatctatctatctatctatctatttatctctgtctctggccagccaacttagccatatcagtaagcctcagttacattgagagactccccatctcaagaactaagatggaaacttcctgaggaatgatatctgaggctgacctctggcctatacatgcatgtaactaccatgtccagatgcatactcacatatgcacccatgagaacacacacttttttttttaatccaccatgacaaactcccaccaccttgtctatccaattaccaccatccctttagatctgaaaaagaaacatcttcctgtctctgagaagttcaactggagctgcctacagccttccagagtcttatgtccagcaccactcggagccccaacagtcaattgttatcaactacgtaattgcattgagtgtgttgtacatactttcctcaccccatatcctctggtagaccctgaatctgtggctgaaaggaaatattcagagagtctgaccacacattacacagcagtgagggtcaggaggaaggaagtgtgtgaggagtgatggtgctaagagcagggtgggggtgcccaccaagctaagaccagatgttttcagaaattactagctttggccctcagcaagctgcaatagaaaccacttctgtagcctgcccctaccatctttctgagtttcgtgttttcatttgaatagccattaaacaaaattatagagtatcagttcagtcctaagatctctgttgtgctggggaaagggcactcacaccagtctcataaggactagaaccacatgggatgaaccctacagaaagggcatttaggataagggaaggctccaagaggaaggtttcggctggagtttaacagctagatactagccagataaggagaagagaagacagctcgaagacaaggaaacctccgtttgttttatgaacacaccaagttttgtcaacattctgcaccttatactttctgctctctgtgcctgggatgtgctactcacaggtcttccttcaggctcagctcagacatgaccttaaaaccccttctggggcattttcaagcacagtacctctcatgcatgagattgcaaatgaatcatgaagggaccttgcttaaatggaggttctgactagaagtatcccctgagagtctgcagttttggcaaggccactggtgctacagtgctgctaacccaagtttgccttcggtagctctagctgtgacatgccatcatatcgggcacttctcataccacttgtcactatataaatttatcttgtccatcaatttttccctagttatccttatgtatgactaaaccagtaactaaagtatgcgtataatattatcagtatattatttggttttatatcatggtatccctagaagttggtatatagtgtttgcatatcaaatatgaataagtatatgagctgattaactaatattaggaatttgtcttcctctcccaaggcttactgctctcccataacccagacctccattgtgggacattagctccccaggccaaagacacctgtaggaaatctcaagaaacaacttgtactgtgcctgcctgtcatacacagcagggtttcattgtcccttcctcttatctcacctctcagccatcatgagctcaccccaaacatactgtgttttcctattcagtttgccatataaacctttagtaattccagccagagctaccctcccagcatggtgcctgactagatggaaatcttgggttctgtccccaagacttttcagtcctgacttttcttagactctttaacctataagctctaaaaattattcttaagaagcttctttctggtcacctagtgagtctcaatcttcaacttggtgtgcctatgaacatgggattgcacactttccaatttctcccttttccaaaccagttttttttctttttctattttattaatttatttggctgtttggctgattgatttgggggatggggtggtttacgtgttcatatgttcaaagtcccagtttcctgtctgcaaaatggggagtaatagtcaataaattttgaaagtacctgtctgatggactgaggtgcagatgggatggggggatataccccaaaccccagcacgccatcaggagatgaaagctactgtggtattccttgtgataggcttggagcttcagtgaatatgattgttgcactttcccaagggtccactggactaggaagcaggctcattgcttggatgagaggactgaaatatgggaagctaatgctcttctgggctcacaagaaaaacagttctcgtgcgcccagttagtgattatgtagctctctcccagaggaaaggagacttaccatcatcaaaagttagacttggatgtatgactttctttactgagtgtacgacttgctgtcatatgtgagttttcatctgctgaaaaaaaaaaaagtagcaaagacaacaaaaattctcctgtagggagagaccctgattaacaggtaccactgaccatgcctgtttgggcgtggtcacaggtgtgtagcagggtgttgctgttgtgttgctttgttttattttctcaggagtaaagtccacagatagatattccaagtgaggcagcagctgtgctaattgctgagttgggtttttttgtttctgtcttccttcctccctcccttccttccttccttccttccttccttccttccttccttcctctcttccttccttccatttgttttgtgtgtgtcaatttgacacaagccagtgtcatttgggaagaggggacatcaattgggaaaatggtcatcagactagcctgtaggcaagcctgtgggcattttttgatgaaagatttttgtgggagggcccagcccactgtgagccataccaccctgggcaggtggtcctggagtgtacaggaaagaaggttgagcaagcccgggagcagtgctcttccatggcctctgctttggtccctaccttcaggttccaggcctgcttgagttccttgcctcacttcccttggtgatggactatgattggagcaggtaaacagaattaaccctctcctcctcatgttgctttttgtcatagtgtttatcacaatgataaaaaaaccaaacgagggcagtagctgtgtgtcaggaatgagactcttaactttctgtgtgctttgagggtaacgttccccctcacttttattgcttcttgcccccaaggcagctgctccatgccagctctggaattccagcgagaacaatagaaagatgggtgaaggggtgggattcatctagcagtggaatccacttccttttaaagggctttcccagaatctctggccagcaagtacccttccatctccttagctaaaagtatgccatacggccagtcctagagaagctttaaagtatagaggttcatttcattaagcttatggtcacaccaaacatttacattatagatgttacagaatttatagtaaatagcattattagtaaggaagaaaggggaatatctatattgggaaatcagtgtgagtgtctgccctacaatctacatcagcagagtcctgctgtacatttttagggaagtataggaggacagcctccgtctacgctgttgctagcaccatgaccttcccaccacgtcagtgcggagctctacctccgcttgattccccaagtgctcagctctagtcctttctcagctcacaaaaaccagagtggttttggaaaagcagagcagatcatgtcattcttctgttcaattcatagaacttcctgccatatataaaacaaaacaaaacacaggcatcactcactcacaacccacaggcactgtacgacctcaccctgcctacctctctagtttcattctactctttattctgtcattcgtacattcattcactcagactcatttgagcacctactgtatgcaaagcattgcttcaagtacaggaataaagtgaggaagtctgacagaatcgccctgcctttcctggtttgcgatagtaagtggggagctagggccagtacagcacgtttggaatagtcccgtcatccacctgcacatgagcccagcacacagtttttatgattttctattcttaccccgttttgcaggaggaaatctgagactttatgagaggaagtgttgctttcagtttcacacagaattcagacttgagcccagatagtcagagccatgacatggagctataaaacgcaaaacatcccgtcataatcctggctggagatcacctcgtctgaggacttattccatggcagacactgttacgagagctgtgtcttcatgcaagcagtggctcctagaacagcagctcctggggggagtaaatcgttccttagagaaataaatcaagaggaaaaagagatttgtctcatttcaccctctttcaatccagtagagaactgcttttatagaaaactaaaaaccagagacacagggggatggggaggggctgaggaagccccccccccagcctttgctgttaactgcttagtactggttccaactcctttgccactaatcatctaattgatcctcctgaaaaaagaattgacttttaaaactggagcccctaggaaggggtataccaatcaggatttaaaacagcaagagcaatgagcaaagactccccacttccctcccttgccccatcatactaaaggtttcctagtcttacctcctgaacatgtcccaggtcatctcttccctccatcctgccttgacctcaaggtttgggccttttttgggtctcaaggatcccatctggtctccttgtgtggtgaaatattatttatgatttatgaaagctcacctgaggattcagaaagcgaagtcagccataggccatagaatccaagcacacacctttaatcccagcagccaggttcaaggctactcagggatacattagagtgaatcagtctaaaagagaattagagctcacacctttaatcccagggttcatgagaggtaagacaggagccaggtctcagatattcattctccagccacactgaggataggaagacattcagtctcaggattcaatggccacactgaggagaaccaataggatcagccctttcagcctgacctaggggaaagagctagtggctgggtgctttgcttttctgatcatcagtttgaagtttgaacgccaatatcagtctctgggtcttttatttatcgtgtttttcatgttacaacctgcttccatcctgaccaatccttaggtctcttgatctcacctacaatacaacgtatccccctagacctccctcagtagctctcaataacctacctcacatttgtctccagtctcatctctcagctttgaatgtgcattttttcttccttcattttttatttaaattagaaacaatcttattttacatatcaatcccagttccctctcccttccatcctcccatgcccccaccaactccccatcccatcccccttctgctccccagagagggtgaggccttccatgagtgatcgtcaaagtttgtcacatcatttggggccctctcccatgtgtctaggctaagagagtatccatctatggggaatgggcttccaaagtccattgaatgtgtatttttaacattggcagatattcacaggtcctgtctcccacattgtcacaccctcttacctattgtggtttgaatgtgaatggcctccacagattcatatatttgaatacttggtccccagttagtgaaattgttctggcaggattataaggtacagtctttttggagaaggtgtgtcactggaggtaggctttgaagtttcaaatgataatgacatcccagtcatctctctctctctctctctctctttctctctctctctctctctgcctccaacttgtggatcaggatggaagctcttagtcactgttccagcgctatgcctgcctgcctgcccgatgccatcataatgattatggactaaccctctgaaactgtaagcaaaccaatgaattctttctttttaggtaactttggacatggtgtcttttcacagcaatagaaaagtaactaagaccccacccttgtgtgttttatatatacctattctctccacagaagttcttgcttatctttcaatgtgtatgtaactcttgctctgccttcttgaagaatacatgtgtccctccttcaagctccaaataggcatacactctaagcacattaggttgaatgtacctgtttaaatgattatctagcctaccacacatatgtctcttttcttcttaaataaataaataataatatttaaagaaataatttattatctatttattatgtgtggacatatattttgcatatatgtccacatacggtttatgtgtctggtacgagaagagggcatcagatttgctgggaatgacattacaaatagttgtgggatgctgggtgctaggaattgaacctgggtcctctataaaagcagcaagtagctgggcattagtggcgcaagcctttaatcccagcactcgggaggcagaggcaggtggatctctgtgagttcgaggccagcctggtctctagtgcgagtgccaggataggctccaaagctacacagagaaaccctgtctcgaaaaaccaaaagaaaacaaaagcagcaagtgttcctaagccctgagtcacctctccaggccccacatgtattccttgaaagaaaaaacagttgttttagtcttccttgcatccatgacatttacgtatgtgcagtgtgtgacatagagattgctccatatatactaagaatgaaagtacaggtagggagttaaatatcattgtgagcagtatgtaaattcttagcttgttatctatggtattcagtggagtctcctatacttgattaactataggtagctgctcacataagcacttgttagtgtaagacttcagctcattccatttcatattagcctgtaagttagtggctgttactatctccatctacagatgcaaaatctggagtatattaattttcttttccaggatcacaagtctagtaagtagtagggttataatttgagtctgactccagggccaattgcttaggcaataaccacaaggttggttgtcagccaagaagcatgtatgatacactccagacaaacatttccaccatggtacatgtggggtgagaataagtggataatacctgtcttagagacagaaccaaaagagacctgtactgagcataagttgtcagggcagctgacaccaagagcaataatatggttttacattatctactcatagctccagttctgcaacgttaagacattgatgctagtagggtcaagttcatttaagctaccatttagcatctaaaggcaaatgcctttaaaccaaacagacatgggtttaaaaccatccacttcaaatcattaatctccaagcctgtttcctcatctgaaactagagattaagcagtttttaaacagttttaaggattaaaggcaagactataaattaggtatcaagtgacctgcctagcccatagacacacacataatgtatgttattatttcaaagacattaatttttatcacacaagcaccaaatcagaagtcatgccccagatcaagactcctccctttgagggaggggccttcctgctctggagagggagaggctccccaagaatcgactgcagtgggaggttcttattagacactctcgatgagtgaaggggaaacctaagcagtactcatggtgtgtctgaggaagaagctctgggtgtgtctggtttcactctactttggatttcttcacgttagtagcttcacattggatcagaaatgtaagagtggctctgaagtggtgtcttacaggaagattgctctctgccatctctgatcagggtaaaccctggagaataattttctatgtagggacagctgatggttatgagcctgaactttcaccactagtgtatgtgactcttgacaaccccgggttcggaaaacactgttcctgctggcaaagcatggtgggagcagacttcgggtagttttccaacctaagtcaggagggattgcttgaggttttctgtttttgtttttgctttaagtgacttttgttgttcttgctgtccatgttcgtttttacctaagaataaaagtcaaacaactgacagaaaaaagaaaaaggaaaaaaaaaaactaaaggagagctcccatgtgtcaacagcaagagcatcgtccgccatctttaatggaaaagcccaggagtctctcttgttattctttctcttccttcaacccacctcacccttcatcctgtctatgtctggggtgccatattgtgcaaagacaaaccaggatgatagacagttatgtcctctagagtgtttagagtctccttactcccctatttttgcaatgataggagtatacacgcacagatgtatgtgtgggcacgtgcacatgtgtagacaagaggacaacctatgatgtcacccttaggaaagccatcaacttccttcctttgaaataggtctttccattggctgaaagttcactgattaggctagcctggttgcctagcatattccaggggcccccttatctctgcctatcgggataacaagcatacaacacactctagacatcaattgtaaggcaagtgtttaccaactaagcctcacccccagatcccactgccttcttcaccacacttcccttctaatgtttccaagaagacagctttagagaatgttaagaaccatttgtacaacctcttgactcaactgtaataatacaaatggctaatatttgctgggtgttcactgtattccaagatctctgtggacagctttctctctacagtttgggtttttttttttttattacaataaatgcacatttcagcacctatcagcatcatccattttcataactcctctctctaaaactgaaactcgatcctctcagagctttctatgcatgctgttctctttgaccctcaaggcaattctgcaggaaaccaggctttacacacctgcaattcaagttactcagaaagctgaggcaggaagatcacaagtttgaagccagcctagataacaatcacgaccatatgtcaaaatagtctaaaaaaaaacaaccaggggtgttagcccaaaggtagagagtttgcaaagtacatgcaaaaccttgggtttaaaccacagtgccacaaaaatatataactttttgtggtagtcaaaattattatcgtcaattaattttttttttaaccaaagaaaggaaaaatctcaccaagttcacacagccaataagagacagtagtttgggatgagccaaagctcctgtcaatactcttaaactagactcttctcctataatcctatcagactgtttgctagctgtcctatagcaaagagactcagggagatttagcttctggctctgtggccctatctgtggtctggacgtcttatggaattgcctcattaataaatgcatcctgcccatacagcaaatgctttcaagttcttcttcatgtagcctctgtatcagaaattgaccttgtaggaaacaaccagctgatccttggagggagtcatgccacttttttctcagaccatggaatgtgagaatgggtcctgtgagaatgtggtcttcctttgtttttatctcattttcataataaatgcaagcatttctccataaaagacagactgctggcaaagttgttccttcttttcttttctttcaggtttttaaagaaagaaacaacttcacagtcactgtcccagcagcaagccagctacaattaggccccgagtcttccccatccaggaggcctggcctgtattgtccgagatgaacaattggatctttttttctgtggctcatgggaagtccttggaaggttgggtgtcagggcaaagcagtattttaggaagataattttttctctgttgaaggggatggcacagtcatctgtcagtcactctttggcccattatgcaaaacacttctctccagactgctttgatatttattctcaaatttgtatatgaggaaaaggggattacaatgtagtatttttatacatagctatacaatgggagacttgtggttagaaggatacacagacaagtcaccaaagctctccatgtcttggctctctaatctgtagatgggaataaaacagctatcatttggaaatgagtataaagtgctctgcatcatacctatcatacatacatgggatttgccaatgtagcttatttcacaccatcatcactacgaccacagcaaccagagcagaccttcttatggtcactgaaaccacactccatagacatcatcctaggatttctccaagtgttctccaacatgcaggagatccaaccagggacaaggactgaggaagacattataggaaatgtgctatgtacttatgaagactatgagagttggtcaaggaaaccaatcatgtgttaatctaaccacggtgtcaagccccagaaaagttaaggtcgttggacaacctttgggttgtcaaaaaaatccttcacagttatcagtctgtttgggcccctttacaaagagcagatgttcacagatatctttggttaaatctaccccatgggaattgtccagaaacagacatggcatgttctggactcctccaaggatgacgtactgatcatttgttctcttcccaattcatcttttacccccaaaacacatcctctatgaaagatattcctctttagaagttcctctcttgggttttagagaactttttagcctgaactctttgaaaaattaaagcgaattgctcttgtcctgcgatgtggggataccttgtgctggccaacgatgactgtcccagacacgtcccaaaccacagcagatcttattgtttaaagtcttaagcagctgttaaaacataccctcagatatcaaagccactctaattaacttcctgcttctctgggacttcaaagtctttcagaaagttttaaatagagtttttatagagaatttgacctaatatttaaagtaaaatttgcaagcttgcccaagagactctgacttctccttccctgttccatctgccaccacccacccgccacccacccctctaccccaccccccttctcagtctcagttgcagagttcaggaaccagttctgagaattgatgagaaaattgcaaatctgacatcaatcaaatctctttccacttatccacactggttctcagaccagtcactgacatcctgcctgaatgccccccaccccaccccaccccagctcttcttaatctggcaccttctgcccatcccctaaggaacactcaaagcagctctgcaatgtgcccctggctctctctcagagtgagggcacagttccttccttgggagcccacacatctcggctaagccataatcaccatgaattggaatgtatccatttatatgtctgcctctctgtctagactatgaagtccatagggcaggagctgttttctattaagctttgtgctcccatagcctaaaagaggattgattcttcatgtctatctataggcagaacttaacagatctcaaaagagtctaataagtgatttcaactttattcttcggaaggttgcgacagaatgtttgtttgtttgtttgtttgtagcagagtcttgctatgtagcccagattggcttagaactcactatgcaaccctggctgtcttgaactccagattttcctgcctccaggtctcaagtgctaccacacctacatgagttatattttaatatttctgttccataatggttttgatgtctaccactttgtttgctatgggaatactagcaacaatatcataaaaattagccagaacttggaaataatggggagaataaagaggcggatggcacacctttcagagaccatccaagaatgtactgggtgcatctatctgtgtgactcagttatttcatatctcacagatttgtggccaatataaagtttctacctagagaaataagtaaccccaaaggtttgcagcctgttaacccattaatatataactctacagtcttatcctaacatttttattaaattacctgtattctgacttgctagtcttagaaaaaagccgtatgacatcttatttgttccctcattattaatagctaagtataaaacgtttcatcatgtggcctttatattttttccctcagtcaatattttttccctaaagttgggattccaagtgacagcaggaaaccaagatatcatcagggcagttttcatggagcatctgaccctaaggctgggagtgcaagagaccagctctgctagaaagttccaataactcaagaaagatccttttactgtctgacaaatggataaagcaccctacactccctgtttccttcccagggatattgagggagtcaatgggtacaatttacttaatgaattgtggaaaagtcaaaagagtcagtccccaggaggacagtccatggagggagctggaacaagcatgaaatgaagtgactgctcctgttgaagccactgtcatcccctgccagggctttctaagactttcactctcacctccatcctatccattcttcccaccatagctaatgtttcttcaaaactggaggcgccatactatttccagccctccagggcttttcactaattgtggataaactgcacggccttcccttgctctactcaaccctgtggcttatccgccacactcagccactctcattgctatgctatactcttgttattgggtgcctctggacctttgcagtggcttttgctttgccctggacattgcatcccatctctcctttataacactggcttttctttatgtcaatctaaagttgacccttccagagagaccctccctgcctacccttcctaaaaacatatttagcattttcctctcgatgagcaccttcttcctcaaaacactctttagactcattagacaatgtttgggcctggcatgtcccccaaagactggtcaccgatccattgcagtgttgggaggtggtggaatcttcaggaggtagactctcacgggaagaagttagattgctagcagcttgcccttgaagggaatattgggaccccagcctctacctatgtctctgcctgtcccagccactatgaaacaagcagctatacccgcccccccacatgccctgatattctgccctaaaacaaactcttccttcttttaagttgatcgtctctggtattttgtcacagtgatgaaaagttggctaaccaactaagtactgcatcaacagaggctatttctcttgggttcaccttcctgcttagcacccagtaggagcttagttcatatctgttgaaaaaaaaaaagtgagggtaaagttacaagattgtggagttggcttcaagtctaagtgtcctgtattgtgtgtatacatttttgaaccagtgcaatgggtcagaatgcccagaattttcaaaagactgcagctaagaagacaaacacccaagctcccaaggcatagtctcagagctgccttcaggaataggtccccctcagaagcgttctgcttaagaaacagcaagtaatagcaggtctcctcaccaacacatcattccttaactccagggatagggaatctctttatgagaacagtccttcctactgagaattaaatgttgcccagatacaaggctgcatctgaaccccagggctaagttgaatcagatgaaagaaacacccaactggaattcaagaatatttcaacagcatgatgggagagaaaatcccaggcaatctcacaggactttatctgtctaggtttgctgcagggtatccaattacacagctccctccacacaagcctgccttccttaatcagagccgaagggcactgcttctcttccagattttctgtgatgctgttcccatctacttcaactacttcagcatggcgttcccccaccccaccccttgagatccttccacaagcccctgggcagtgctggctgaggctcacattgaatgagaagagacacggggaacccgctgtgctagccacaagcagctgactcctgccacacacccctgccttctcatttgccatctcaaggatgtgagcactgtaggctgtggcagccaatagctgttccccagaaatgtgtctgattggagaaaggccaaaaatgagttcaccgtgtagctgacttccagccatctttagatcaggtgctgctccaagcggtcccccagtagtcctttccccaggcaatgatgccaaagaggccacttgctaataacagcagggtgtatgacgattctgctacagccaagagaggttcattacagatactgacatcaagaatgctctcttgaagtatttcacacaggcaaaagctttttttttcaccacacccattaatttggccatctacactgagagcctaagtttaaactttccaggtcaagactcccacctatgcagctgctctgcccccaccctcaggtcctgactctgaatccaaattacaccatttctctggccattctgaaacacttacatgcaaaacatggcccctcttcacccaaattcgttaacctcttaagctcagaaaaccacacataggaaatgatggccatgctttaattctttttttttcttcagaaatattcttgtggccaaaaatagaacattttccattctgggaaatgagcggcatccatgggaattgaagtagtgcttcttgcttctctagaaaattacacacacacacacacacacacactcacacacacatacacacacacacacacacactcacacacacaaacacacatacacactcacatacacacacacacatacacacatacacacacacacagacacacacacagacacacacacacatacacacacacacatacacacacacacacacacacacacacactcacacacacaaacacacatacacactcacatacacacacacatacacacatacacacacacacacacacacacacacacacacatacacacatacacacacacacacacacacacacacacacacacatacacacacacttctgcacacataagtcatctgtaaattctaaaaggctgctttctgtatgtgtggctatggccaaaaaattctgtgcttattctttgttcaagaaagctgtcaaaaagggagacacatgggaacctcaagaacactttataagacaaatctaatttattccagattagggattcaggaagccgtctcctcttgcccaccatcatctcaggattcctctcaggactctcttgtaaaattctaaagccagcactggatgactagccctgaggtctctgtaaggttacttaatagtatcagaaatggagatttgggaaagttatttttgacctccaatgcgtaacaaggtttatggacaaagtcagatttggatcaacgtcagcatgtctgaaatatagaaattacaccactggcgccagacatttccacctttaactgttctcagccttttcgcaacttcctttaatagagtcccacagctacaatgacatttcagactttggttgatggtgtgtgttggttttgttttgttttgagacaaggtctcactatgcagccctgcctagcctggaattatgtatgtaaagcaagctaggctcaaactcacggagatctgcccacctctgcctcccagctgctgggattataggtgggcacagccacacccagttccatttcagacctccatatttaaatatatagcccacgaaatatcctcccccaccccacacagagacaggcttagctatgaagtcttcagggttatattttaatacgcatctggtaagaattcactgttgagaaaaaagagaggtccttcaaaatagctggatcattgctgaaacaatgtgtggcaaagagcaatatgccaatcatcaggcaagtgaaggaagggccaaggtggtaagaaaagagttaggaaaggggagaaaaaaacaggaagtagaagacacaagaatcaagaccactagttggctggatatccacaaacagagctgacagatagacccaataggccatgaaggcacaagaatggaaagtgagggagtcggaagaggagcacgagaggacggcagtgtaggctagtggcgagtattatcgggtatttatttcccacgtgggctacatggggctagttcatccatcactctgccagttcctgtcttgttactttgctattcagtgggggccagagtttctcctagaggagtgcattaatgcataagatgctcagggtagtacttggtactcagtgagctttcaacagatgagacaaacatgatgctccggagttagagctccagtatacgttcttgatttttttttttttcttagaacatgaaaaatcacagaaatcctaagggatgagctagtgagtgccagtgaagaaagggactccatggtaatagtgcagacactgatgggcacttgggacaaggaatcagtaccaagcactgaacaacaaaagggaattgacagctgctggtttgtcacgatcgctctttcagcttctctaaccccatcagcaaacattgtcctggcaagtcttgaggatatgcttatgtggtgttgctcagattgtcttctatcagcaactggagcaccttccaccagcctggtcatcttgagtagagtgcctattgaacatataccctctgttctttctgcctttaccaaagctgctggctcccccggaatcctctttcctgttttagtgctttgaagttggccatgtggtgttaggttttacactccctccttccatccatttaccaacccattgagatgagatgccctctgctgccctgacacacatactctaaatacacaaatctcaatatgacattaacaccttactgtgtccccaaaagatggcattttgaagtactgatccttcctgtatgtgacctccctggaaatagggactctaaagacataggttaaaatgaggtggactctaatgtaatgtgacttcattgcttacgaagcccgtatttagttacttaaagaggcatgcagagtgagggctgagacagccatgcaaaggcaagatagcagcgatgcagctgcaaaccaaaggatgccaacgtgttccagcaagccagcagaagctgaaagcgtggcatggagcagacaaccctctcagccctgagaaatcccatccctgtgccagcttgactacagacttccagaattacctctgtaaccaagagccacttggtctgtggttctctgttcctgcagccgtaggaatcgaacccatacctcagctctgtgcctggtttccataggagatccctgaggcaaaggaccgagtctcccttgccccttatgtcatccagcaggtaaaggactctctttgctctcagtcctcactaaataactcccaggagtccacagtgtggaacactggcttgtaggctggtctagttcaccacctgctttggtaacatcgccatgttcattcattcatattatataccattggtttcccccttaaacagctatcgctagtgacagaagaaatgataccatctacaatgtgtaaaatatttacaaaaaaaaatcactactgaccattggtctaaaagaaaacacataaatgaacagaaataggactaaaataagatctggaatgttccacaagtaactacagaacaagagatgatgggttgaatcagtcttgatagtgaagatgatatttggacactgagaaatgttttctttgggaacagcaaagcatcatgcattcactctacggtgccaactggactgcgcatgtggctggcactagtggttgctgagtggctgggtcatcaaagtagagccagttcatgggggttaagatgggattgtaaaactggaaaagtgatgccagttcccctcaactggctagtcgtgtagctatatgaaaatgtcttttctcgccattgcagagcaggctagcagtaggcaaaagaacaggaggggcccttggcattctttagagaggcaagggaaaccggagaagtggcactgctaagacccagagagaggactagctgcccaagaccagtagcaccaattcatcagacacatggtctgatgattcttgcttgcatgacccttaaggtgggggggggacgctttggttaccaagaatgaaacagctttctgttccttcttcaatttcttgtttttttaaacaagaaattgaagaagagagaaacagagaattaagatggcaaagctgaaattaatgcctcacatatcaaatgctatactctttctctaaattcaatgagattgacataaaagggggggcacttgccatttacaataacatgaataaccctagaggaaatcagccagacacaaacacaaggtaatcgtacttatctatgtactctaaagaaagaagaattcatagaaacagatgatagtagtttccaaaaggatacgaaatgggagtgatggatataggtaaagtcaaagggtcatagagcatcacccataaaatgagtaaaagctggagtataacatacaatatatgcatatgtttagatgtgtataatgatatgtacatatcattataaggtactacacatttgaaatttgccaagagatcaggtttttaaacggtctcactcaccaccaaagtgactgtctaagacaatggctatattaaccgtggtgatcatagtgcagggtgtgcaactatgaaaacatcacaggtccacctgaaacacaagacaactctatatcaatagtgctaggggccaataaattcagtaggactgaaaattaatcaagtgtatatgatccatacccacagacggcccagacacttcaacaaccggcttaaagtaaattaacaggttttaaagtaatcccagctacaaattactggcaaactgctctgtgccaggtgctatgcaagttattttagacagattacctcatttgatcccggctaaagccatgtgtggaaaatatacagtaaggtaaaatctgtagttttcaagataaggaaattgaggcccacaaatgtcatacagctatacagcattctgggaaggagccagggcttggggcatcccacaaagagggaaattaaagtccatgtttattgaaggcttattctgtggaagtattcttctgtgtatcttacatactttggctcatttaagcctcaagacgacctcttcagaagagggagtaagtaaagaaatgagcttggttcaatggagtggcaaaggtcagaattgagtggatgaaaaaaaaacttcattttccaaagaaatcccccccaggagggggggtaggtgtacaaataaacattagaagagaagaacagctaagttgatattaaataagacaagctaactctaggtgtcttccaagacatgtctcaggagtgcctcattcaggtgccttagacaggcaagatgaaacaaatgcaacacatctttacatattacataactaaacaaatgcagcacaatgaccctaccgaggagagtgtaccctctgctcttgccctactcctgcccaaagtcccattcactctggatttctcagtgcctgctcctgcttggagtggatgcacccagccagtgaggagctccctgggtctggaaacacctcactcttccttccccctccactggcctgacccctaccaaggcccgacccctaccaagtgaggagactaccaggagaggcaagaccatccagaactgcagacattgaagtcttggcccacacacaccactgggtgacaagaggagatagagagaccccacctgcacccaatggaagaagagatgggaagaagacagaataaaaacacattcaacatcagaaagaccaatatgacaccaccagaatctagggactccacaccagcaagatctgaaaagcccaacacagaggatgaagaagagatggacctcaaaaattatcttaggaagatgatagagacctttaaagaggaaacaagaaaatcccttaaaaaattagaagaaataacaagcaaaaaattacatgaaatagaggaaaagacaaaccaaaaatttcaagaagtaaacaaatctcttaaagaagctaaagaaagccaagaaaaaacaaccaaacaagtgaaggaagcactggaaacagttcaatgcatgaaagctgaaataaaaacaatgaagaaaacacagaacaaggggatgctggaaatagaaaagctggataaatgatcagaaaataaagatgtaagtataaccaatagaattcaagagatggaagagagaatctcagttgttgaagactcactagagaatatacaatcatccaccaaagaaaatctcaagtccaacaaatccctaatacaaaatatccaggaaatatgggacaccgtgaaaaggccaaacctaagaataataggtatagaagaaggtgaagaaaccctgctcaaaggtacagaaaacatattcaacagaatcatagaagaaaactgccccaacctacagaaggctatgcctatgaaagtacaagaagcttacaggacaccaaatagactggaccacaaaaagaagtcccctcgacacataataatcaaaactccaaacctacagaataaagagaaaatattaagagcagcaaaagaaaaaggccaagtaacatataaaggcagacctatcagaatcacacccgacttctcaatggaaactttgaaagccagaaggtcctggatagatatcctacaaacactaagggagcatggatgtcaacccagactactgtacccatcaaaactttcaatcactgtagatggagaaaacaagatattccatgacaaagccagacttaagcaatacatatccacaaatccagcactacagaaagttctggaaggaaaactacaacccaatgaagataactacactcacaaaaacataggcaatagataatccaattttaccaaacacaaaaagaaataggagggtgaaatacacacacaatgacaccaccaacaataaatccaaaacaaacaagaaccatcatcaatggacattaacatccctcaatgtcaatggtcttaacctgcccataaaaagatacaggctaacagaatggatacgaagacagaatccatccttctgctgtatacaagaaacacgcctcaacttcaaatacaggtgttacttcagagtaaaagattgggaaaagattttccaatcaaatgggcccaagaaataagctggtgtagcaatcctaatatctaacaaattagacttcaaactaaaatcaatcaaaagagatgaagaagggcatttcatcctcatcacaggaaaagtccatcaagatgaagtctcaatcctgaacatctatgccccaaatatgaagtcacccacatttgtaaaagaaacattactaaagctcaaaccacacataaaaccacacacacttatagtaggagatttcaacaccctgctttcaccactagacaggaccaccacatagaaacttaacaaaaaaaacaaagggtctaacagaagttatgacccaactgggtttaacagacatctatagaacattacatccaaacacaaaagaatatatcttcttttcagcgccacatgaaaccttctcaaaaattgaccacatagttggcaacaaatcaaacctccacagatacaaaagaactgaaataaccccctgtgtcttatcagatcaccatgctttaatgttagaattcaacagcaatacaaattgtagaaaacctacaaactagtagaaattgaataacacccaattgcaccattcctgggttgaggaagaaataaaaaaaaaagaaattaaagacttcctagaatttaatgagaatgtagacacaacatacccaaacttatgggacactctgaagcagtgctaagaggaaagttcatagcactaagtgcctacatgaagaaactggagaaaagtcacactagagaattgacagaacaactgaaagctttagagcaaaaagaagcaaactcaccatggaggagtagacgccaggaaataatcaaactgagggttgaaatcaataaagtagaaactaggaaaatattacaaagaatcaatgaaacacagaattggttctttgagaagatcaacaagatagacaaacctctatccaaactaaccaaaaggcagagagagagcatgctaattaacaaaatcagaaatgaaaggggggatataacaacggacacttaggaaatccagagaatcatcaggtcatactttgaaaacctgtactccataaaattcgaaaatgtaaaggaaatgaacaattttctggatagatatcacttaccaaaattaaaccaagaaaagataagcaatttaaatcgacctataacacctaatgaagtagaagcaggaatcaaaagcctcccaaccaaaaaaggcccagggccagatggcttcactgcagaattctaccagaaattcaaacaagagctaacaccagtactcctcaaactgttccacacaatagaagcaggagggacattgccaaattctttttacaaggttacaatcactttgatttccaagccacacaaagatacatctaaaaagagaactacagaccaatatcccttgtgaacatcgatgcaaaaatactcaacaaaatattggcgaatcaaatccaagaacacatcagaaaaatcatccactatgatcaagtaggcttcatcccagagatgcaatgatggttcaacatacaaaaatcaatcaatgtaaaaaaagaaaaaaaaaagaaaaaaaagaaaagaaaatccatcaatgtaaaccaccatataaacaaactgaaaaagaaacaccacatgatcatctcactagatgctgaaaaagcctttgacaaaatccaacatcccttcatgataaagatcttggagagaacaggaataacaggaacatatctaaacatgataaaagcaacatacaccaaaccaacagccaacatcaaactaagaaactcaaagatattcctctaaaatcaggaacaagacaaggctgtccactctctccatatctctacaatattgtacttgaagttctagctagagcaataagacaacaaaaggagataaaaggaatacaaattggaaaggaagaagtcaaactttcactatttgcagatgatatggatagtctacataagtgacccgaaaaactctaccagggaactcctacagctgataaacactttcaaacaagtagcaggatacaaaattaactcaaaaaaaaatcagtagcccagatgataaatgcaatgagaaaaaaatcagagaaacatcacccttcacaatatccacaagcaacataaaatatcttggggtaacactaatcaaaaaagtgaaagacctgtacagtaagaactttgagtctttaaagaaagaaattaaagaagataccagaaaatggaaagatctcccatgctcttggataggtagaatcaacatagtaaaaatggcaatcctgccaaaagcaatctacagattcagcgcaatccccatcaaaatcccaacacagttcttcacagaccttgaaagaacaatactcaactttatatggaaaaacaaaaaacccaggatagacaaaacaactctgtacaataaaggatcttgtggaggcatcaccatccctgacttcaagctctattatagagccatagttctgaaaacagcttggttttggcacaaaaatagacagataaaccaatggaatcgaattgaaaaccctgatattaacccacacacctatgaacaccttatttttgacaaagatgctaaatctatacaatggaaaaaagatagcatcttcaacaaatggtgctggcacaattggattcggacatgcagaggattgcagatagatatctgttaccatgcccaaaacttaagtacaaatggatcaaagatctcaacataaatccagccacactgaatcttctagaagagaaagtgggagatacccttaaacgaattggcaccggagactgcttcctgaacattacactagtagcacagacattaagatcggcacttaataaatgggacctcctgaaactgagaagcttctgtaaggcaaaggacatagtcagtaagacaaatcgacagcccacagaatgggaaaagatctttaccaaccccatatctgacagagggctgatttccaaaatatacaatgaactccaaaagctagccaccaaaacaccaaacaatgaaattaaaaagtgggatgcagaactaaatagagaattctcaacagaggaagctgaaatggctgaaagacacttaaactgctcaaaatccttggccatcagagaaatgcaactcaaaacaactctgagataccacctcacacctgtcagaatggctaaaatcaaaacaccaatgacaatctatgctggagaggatgagaagaaaaaggaacactcctccattgctggtgggagtgcaaacttgtaagaccactttggaaatcagtatggtggttgctcagaaaaatgggaatcagtctacctcaagatccagccattcctctcttgggtatatacccaaataatgtccatacaacaaggacatatgttcaaacatgttcatagcagcattgtttataatagccagaacctggaagcaacctagatgcccctcaactgaagaatggatagagaaaatgtggtacatttatacaatggagtactactcagcagaaaaaagcaatggaatcttgaaattctcaggcaaaggaatggaactagaagaaaccatcctgagtgaggtaacccagtcacaaaaagacaaatatggtattactcactcatatatgaattttagacatagaggaaagcattaccagcctacaatcctcttcaccaaagaaactaggaaacaagaaggactctaagggaaaaatgcattgaccccagagaatcggaaggggcaggaactcctgagctaattgggagcatgagggtaggggaagagggtaggagcaagataaaagaatgataggaggagaaggaggagaggagaggaggaaatggaggagcagaaatgttgagttgggggaagaatagaggagatcaggatgagagataccatatcagaaggagccattataggtccaaggagagatctggcactagggagatttccagagatctataaggatgacacaaactgacaatctaggcaatggtggagaggataacctaaatgcccttcccctataatgagactgatgacttctttttatgccatcctggagccctcatccagtggctgaaggaagcagagacagacacccacagatatacaatgaattgaactctggaacctagttgcagagagggaggaatgaagatcacaggggtcagtcagtacaaggctggtgaaacccacagaaacaactggcctgtaacaagggggagcacatgaaccccagactgctgtctgggaagccagcacagaactggtccagacccctgaacatggatgtcaattaggaggcctcagcactctaggggtcccctggtagtggattagtatttttccctggtgtaagaagggaccttgagagcccatcccatgtctcagcctggacacatgggggagggcctaggcccggcccaggatgatgtggtggactttggggaaccccccccttcaagggccccaccctgcctggggagtggagggtggatgcggtgggggacaggtaggggggttgggggaagggctggggggtaggggagggagagggagagggaaaagggattgacatgtgaagcaagcttgttcctaatttgatctaattttaaaaaaagcaaaataaacaaatgtaacacacctttacacagttaaagtaatattccacagcataaactaatgtaacgcatctttacgtagataaaataatattctacaacagtcttgtattcattccacagatgaaaatgtctgctaaaatgtaggcacccattctagcaaacaattgaagttgaccctgaagtaactataggtgctagcaagataaaggaaagggctggtcaagaaaattcaagttcatagacctgatgaacttgaagacaaatcttaattctttatcatggtatccagtagttacatttcttgttgctatgaccaaatgtctgagataaagcaacctaaggaaggaaaagcttattttgcatgagtttcaggagagtcagtccatcgtggcagcagaagcagaggtggctggtcacatggcctcagcagccaggaagcagagagccatgactgccaatgctcagctcattttctcctttaagtcagtcagtccaggacccaccccatttaatgatgctgcccagagttagggtggatcttcctgcttcattaactgaacctaggaacccatatgtccaaaagcttgtctcctaggcaatgctagatcctggcaaggtgctaatattaactgccacgtgattctaaggatttgagttcttcaaaattgactataggaaaataaaaacccctcatgttttactgggggaaattctcagtggttttgggaagccttcaagttcttaccatgtgctttaaaataagttaggcctttaaccatagaattctttctaaagacataagcctagcaaaaccacaaaaaaaaaaaaaatggtgagagaaatcatatcatgcattgcttgagtttgagttcttgatgtataatgtctttatttccatgctcacttacagtggctttttggaatctctgtgtctcagtacccttgtctacaaaatggagattataacagcccctacaacacagaatcacgaagaccataaaagaggagttttgccatttgtttgtcatagaaaggcaataaaaacactggcctgacctggtcagtactaagtgctgaaataaatttatgtacattgcaaacacccagcgatcttcatcacaatattatacattacagtgaaaatctgtcaaaaattaattgctcaacaatgagaacattcaaataaatgatactcgcatataataaaatagaaatacagaaaaataatcaaccaataatgaataggctgtgaagctgcacatgctaaatgatccatattttaacacaacattgtagtgcataataaatgcagtctttgccccagtttgctctttggagaacatatctctcaccagctgctgggaatatcgctgctaatagctcacagctgcatcccacactgggaattgttcttggccctaggaagtagactcatccaaaatcaaccgcctctaggaaagccaaagactccctgatgcagagatactagtttcaccccccactttggttcagagccattcacaaaggccctcccagctccgacgctcccccgggattggggatgtagttgcaaatgcatttggggtcagatgctgtcttgcaaaggggagacacccccccttatctccttacaggaccatctccttagagaacactcccattcatattcagcaggcagctctcagagtgtatttccaggcgaccctaagggccaagatatttttatcaaaatcttacaaagaagagagtcccagaggcttaacagcagagaatctgactataggacattgtgatgcagatacatgtccttattaatttgtccaaatccgtaaggctgtgcgtagcaagccccaaatgtcagccacaaacttggattggtaatggtgtttcaaagtaggctcaacagtcatcacaggtgcatcattccagctgtcaatggtggggagctgcgctttgctggggaaagggactatgcaacacctgggtgcctcccgattggtttcattgtgtacctaaaatcactctagaaaaaaaaagtccatttcaaaatacagattaagaagaatttctctgaatgatgtaattcctggattttctaaaagagtctgtgttatttaaaaaataatatcaagccgggtgttggtggtgcacaccattaatcccagcactagggaaccagaggcaggtggatctctgtgagttcgaggccagcctggtctccagagcaagtgctaggataggctccaaagctacagagaaaccctgtctcgaaaaaccaaaaaaaaaaaaaaaaaaaaaaaaaaaaaaatcaactggcatgtttcaaaagaggcagggtcttccctgggctgcttacctttcttcttaatagcagaacaatatttctttgaatatatataaatagtatgtattcatgtgaaaatgtccttatataacaaagtaccatatacaattaatattttgcatgaaattcttaatggagtaatccatgtaaataacttaaatgatatcactaataagcaatgaatctagaataggtccatatgcatccactttggagaataagcatatcaatctggccaagtggtggtggtggcccacgcttttaatcccaacacttgggaggcagaggcaggtagagctctgtgactttgaggccagcctgatctatagagggagttccaggacaggtagggctacactaaaagtctcagaaaatctaattccttctcaaaaaaagtaaacttattcttccactgggccaagtgtaactggctcacacctgtaactggcatgcaggaatctaagacagaaagatcataagtctgaggccaccctgggctacatagcgagctcctggggtactggtctgggttacagggctagaccttgtctcaaaacataaacaaagaaaaagaagatgagaagagtttccttcctgaacaataataaagaaaatgtgccaaagactctgaaaagaggttcgaacatcttgaggaatgaagcactattggacaagaggccagccacctggagtcactacttatgaggacaatgcttcaattatacatcagctctgagagtttctttacaataagacccaccacacaacttagagctacttttttgttcagtggagactttgagcactaatgcgtggattttcaatccatttctgattgaaaactaacaaaactctacaagtaactcttggagtcaaactttgtaggtatgatgcattcacctcctgtggacaattgggctattgtgatgatactagaaaatgggctattatgatgagactagaaaaagccaacaggacccacagaggctggagaaaagcttgtgaagcacttatggcctacccagtgtatgctgcccatagataagctttaatggaaccgctaatggaagggaaatacaaagtagaggctagagtttccgtactatagatttcacttttatgatgatcagggttcttccatctataacaattatacttcttctccaaccagaaacatcaattatagtttaatatgattatagggtattcaaaaatatccataaagactgaagtaagtctaaggaaatagaccttttttttttttttacaaggctgtctttctagtaatctcaattcttaatctcaggctgggttttcttaaaaaaaaaaaaacatgtaaatgattttatttaaatagcttcaatagtatgcaattagcctaggtttaatatacatttacacttttgagtgtaagtgtctcaatctggccatcttagttgggatgtatatccctaaacaaataatcagaaacatagggaaattttcatatacaaagatttcagtcacaatgctgtaatttatgtatcttataactgtaactagaggtttctctcctgcccatcagttcccaaataaccactctgaggcttaatattaattacaaactgtttggcctattagctcaggcttttaataactagctattacatcttaaattagcccatttctgttcatcacatggccatgacttaccagtgatgctcagtcatttttctcctttggcagtgggatggtgtgtctcttagactctgccttcttcttcctgtatctttgcttggattccctgcctggctctattatgcttggctttggccaaatcagcttctttattaaccaatggtaataaaatatatttacaacatacagagagaaatcccacatcatataacagtgagaataactgttcaacataagggaagtggttacccaaactccactgcatcctcaattcatgtttctgaagacttcatagcagcatggaaggttactcagttacattatgtgaacaaagcgggacatacataggttgaggtctgatgtaatgttaactgcatgaaaaataaacatgagcaaattgttctagtttagttccgattgctgtgataaaacactgaccaaaaccaacttggggaggaaagcgtttatttggcttacgcacccaataacagtccatcattgaaggaaaacaaggcaggaactcaagcaggacaggatcctggatgccagaaccaaagctgaggccatgggaccacactgcttactgacttactctgtggctggttcagtctgcttcttacacaactcaggactgcctgcccagaggtggtctcacgtacagtgggctgggtcctctctcattagtccttaatcaagaaactactcccatggacctgtctacaggccaacctgatggaggccttttatcacctgaagttcccctttctcagaggcccaagctggtgtcaagctgacaaaatgaaccagtatatcaactaagtagcaaaaaccaactagagaaaatcataaataacatcaaaaggacaggaattgtagtgctgccagtgtatatgactttaacccttaccttagtatatgactaatcataatgacataaagaccataaactctgtatgataatcccactttcagaggtgtttagggacagtcagtggaggacatgtctatggatgctcaggaagtaaggataactaggagtctgctcttccactgagttttaaagctaaggtcatgaggagaggaccacctgggagcatgaagtgagtgatgagaaaacgttggccagcctgagcagtctcaaagagctcctggtgtctgggtggaggtggggtgggggtggggtgggggactgagctgctgagctgactgaaatgcaattttcattccacaaaggaatgagaactctagtgaggaatcagctattttgttgatatgaagatgccagtgattgtaaaatgcatcattaatttgtgtcccactaagaaagaagtatgtctcaaattaatctatgaagcaattcattctcggcccttaaaatttttattttacttttgctgaaaaatctctttagacttattgggacatagatttttattacttgtcacttcgatgcatatataaaagggaagccaaattaattgattgagaaatttctgagaacatctcgtatagattctcttctgaagcttcacactattgcacttggagggagataaaatattcctcaccttatccttattattgagtccaggtttccttccacgatgttgccatctgttctaaaagcagtaagtgtaggtgcattcttgatcggcaccttttcgcttactcagtaacattgcagcctcctacactcacacaaatctctagcacattgccacgacaccattgctttgaagcaattcctggaaacagcaataacagaaagtttgcttacctaatattgtatgtccattccccttctctgttcctgagcttgtaggttcactccaactttgctaaagaaatacaaacatttttaagatgcatttttattcatgtgtgtgtcccacatgtgtgcaggtaggtgcccaagaggccagaagaaggagtcagatctgcctcaactggagttcacatatgtacaggtaataccaaatacgttagtattgctactgaaaccaaaaacaattacaaactttcctaaataagctcctgagttcagagatgctgacaagaatattggacctaattcaatgtcacaatctgtggtgagagaagtatgtatgtctgctacacacctgagctcacagaactcggttgtgcccattacactggttgggctctccaaaccacaaccggagtgttttgtgcggttgaaaggcatccagcctttcaacaagtttcacaagcagtctgccacaggataagatctggtgtggtctcaccatgtctgcaggaattggttaagcaggaacagtgccctttgagctgttgacgtgaatggccttcacacaggaagtgtcacccagtccatttttctgtcccttcagagaagacatttcaacctggccctcagtcaggcacaatgaaccttctacaaaaagcaaatcatgaccttctcttcaagatatagcttagccagatattaaaaattaattaactagttaattaattaaatagcaagccataggggaagggagcatagacatgaggttaacggctcagcctcagagtcctattgcaacgagcttgaggcccagatttgtgttcacttactttatgacaagtcacttatctctgtgtgacagagactaggtaggggtactggctggttttgtgagcaagccatgggaagcaagccagtaaccagctcccctccatggcctctgcatcagctcctgcctccaggattctaccctgtttgagtctctgccctgacttccttcatcgataaacagcaatgtggaagtggaagtcaaacttaaccctttcctcccccaacttgcttttggggcatggtgtttcatcacagcaacagaaaccctaagacaaattggtccagcaaagtggagtattgttgtgacagacctgaccaagttttggggagggctgtggaaggactttggaactttgggctacaagagccactgagtgttaagagctctgtgggatgttacgtgggagcttgggagataagaatgttgggagcagaggatggaggcctgacttgtgacggatgtttcagaggaaagtttaaagactatcagctgtgaagctgaagaatcagctgtgattaacaagataccagaactactaaagcaaaactttgctttgctggagtcttatttagggtttttattgctgtgaggagacaccttgatttacagcaactcttataaaggaaacattgaattgagggtggctcacttagagtttcagaggttcagtcagttatcatcatggcagggaccataacgatgtgcaggcagaagcgacaacatgaagttgactgtcacactgagggaagcttgagaaaaaaacctccaagcccgcccccacagtgacacacttccaacagaaggtgtggcccagattaatggtgtgccctccagcctcagtcaaggtccagatcaaaagtgtgagccattcagcctcctccaaaaagaccatacttcttccaacaagaccacacctcttaatactacaagtccctatgagtaatgggggccatatccattcaaactactacagctgggatgctttgaggctggttgcctggaggtaagaagttaatggtgattaagatgagaccagtatcactgaggtgaaatcttctgagaagtgtttcctgagagcataaagaagctgtgttctagaggcagcctaagttgtaccttgtgctggcagccagccttgataatgtgtaagagtcacccaggtggaactggttttgaaggcatgaaggggtcatggagagcagctgaggcttggctctgtgagaggccagaagagatcattggcaaaggtgcagcttcagtggcaattgaaggccaaggactgaaggggtgtacaaagaagttaaagttggaaccatgaagagagcctatgagaggctactggtgaaagtgccgcccagttgcagaagacccctgccctgtttgagctcctgtcctgacttccttcactgaacagcaatgctgacatataggccaaataaaccctttcctccccaacttgccttttggtgtttcatcacagcaatagaaactttaagccatcatctaattcctttatctctagttgaacatgcaactcattctactagcttttgaggcttccctgggttaatcttgtcatctattcattcatccattcaagagaaagcagcacctactttgtgaaatggatatacaaatacaacccctgtccagacagaccagacacaggttagcaaatatatcattatattatagcaacagtgatctttgaaagtgaaaaaacaaagaaatagtgttttgatggagaacaaaagggattaaattaataacccatttaggaaagcctgtctgaagaaataatgtttacaaacatctagaaacaggagatgaacagggcaaagtggaggagaaggttcccaagactccaaagggctactgtaagaggagttcaagagtgagcaaaggaccatgcttcaggatgagactgaaaactagcatggtcacaaacatggttgaggtctaagccgaaacacagctaggatcgtttcttagtacaatgaaaaacactgggggacttaagcagatactgtgctgtggtgtggtccaacataaaagagaacttttttgggggggggggttaataagacccattaggtggctatttcaattcacaaacacaaaggtgaggattgtcttagttagggtttctattgctgtggagaaacaccatgaccaccgcaactcttataaagaaaaacatttaacggaggctagcttacagtttcagaggtttagtccattatctttatggtgatattcaggcagacgtgatgctggagaaagagcagagagttctacaccttgatccacaggcagcagaatcaactgtgtatcacacagcatggaacttgaacatacaagagacctcaaaaccctcctccacagtgacacacttctgccaacaaggccacacttactccaacaaggccacactcctaatagtgccactccatatggatcaagcattcaaacgcaggagtctatgggggccatacctattcaaaccaccacaccccacaactagcccctatgggcttgtagccataacataagcccttaaaggcttgtagccataacataatgcaaaatgcattcagtccaacttcaaaagtccccatagccaagcagtaagcccttttatccatatattttttactctcaactgttcattgcatctggtttgaggcctctggtttctgccacactatcgatggtgggctctcactggtttctgccacactatcaatggtgggctctcactggaactcctcttggttatcctgttgttgccctgtgttgtggagatcctgtagtttggggtctgcaggaccagtcctttcacatgcaccttccatagcagcattgatttttcttttcttttctcttaaattttattttactttgtggggaggggttgcaagggcagagagtagatacaaagggacaagaaaatgaatgtgatggagatgaatgatatgaaagacacaaagaataagtaaaaaaaagtttctaaaaatccccatagtctatcaccgtctcaacaatgctaaaaagtccaaagttcaaagtgtcttcttagattcatacaatctcttaattgtaatcccctataaaatcaaaatcaaaaagcagatcacatacttccaacatatactggcacaggatatgcattactgtcccaaaatggaggaaaggggatagtgaggaagtactggaccaaagcaagactgaaaagcagttgagcaaactccaaagtctgcatctccatgtctgatgtcaaagcgctcttcagatctccaactcctttcagttttgttgactgcaacacacttctttctcttgggctggctcccttccccattagcagctctcctcagaaggtatcacatgattctggcatctccaaaattttggggtctccaaagcaagctaggcttcaccttcacagcttcacacaatggcctctcttggcctccatttagggacacccctgacacatgcctggcctcagcagctttccttatgtgaggagggagattccataacccctctcttccatcattgactctaaagccagaaccccatggctgaagctgccaagttctgaggcttactggggctagaacatggccccctcgttcaattacatcttcaccaactttctatttttgatggttttcttcactgcctaagattggctgtcctgagatttgatctgtagaccaggctagcctcaaacacgaagatctaccagcctctgccttctgagttcttgggttaaaggcatgttccagcacacctggctctaagcttttctttagttccttttcacaagtaggaaacatagctggttgagatcttgccctaaggtcaccactccctttatttcatttcttaatctgtttatccctttgaacataggacttaattccattctacttcctggtgctcctttttgcctcaatcaatacattttgtctttttgcttgctcaaacttgctccttttcattatgaatcttcataaaagtcaataccagtaaccacacaacaagagtctatactaggctgttttgagatttcctctgccaatgcaattaatccaaaactcttcgctttagcttcaagcagacttttcagaaaaagcagccacattcttcaccaaaatatcacaagaacaatctctaggcaacatactaaaattcttctcctctaaaacctcttgagccaacccccccacggttcaaagcaccttcagcatcaaagtcttccatgacccaactggtatggccctttaagcagcccttaatgcattctactgctttcctaacccaaatccccaaagtccaaatttctcacacaaaaacatgatcaggcctatcacaataccccagttcctgataccaacgtctgtcttagttagggtatccattgctgtgaagagacaccatgaccatggcaactcataaaggaaaacatttcattggggctggcttacagtttcagtttagtccattatcgtcagggtgggaaacacggtgctggaaaaggagctgagagttctatatcttgatcgacaggcagcaggaagtgagtgtgtgtgtcacactaggcagacactgtgctgtggtccaacatacaagagaacttactggggcggggggggggggtgcaataagaccctttaggtggctatttcaattcacaaacacaaaggtgggggttgtcttagttagggtttctattgctgtggagaaacaccatgaccccggtgtttaattgttgctgatttgaactgccactcaacagcactgaattaggaatgaaaccatagattcactcactctcagattttcactgtgactctgcctttcactggtcatgtgacaaattaaacacaccctttaacttcttggagcctgttttccttaaaggtcagagtcagcccactgtaacaaatacaattagttacacactcggtatcaatctactttcattatcttttcttattttccttaaagatttatttatttgtgccaggctgtggtagtacacaactttaataccagcgcttgggaggcagaggcaggcacatctctgagctcaaggccagcctggtctcactgtcatttaatttttgccccagtgtcatttcaagtgggcctaatttctcatatttcaaataaaatctagatggtgtttggggatagttttgagaactgctgttttacacactgttgagatcaaactatgtccccctgtaagttgcttcctagtgtgaggagcagtggctttcctggcttgagactccattttacaagcagcttttagctccatatttgagggtgaagggtgatcgtgctcctgggtgaaaccacaaacaataccctttgcctggctacgcatatagcacagactgaaaaatgacttattcttgggagtagaaaagcagtcactctataaatttattgaggaaagtggaaactgtagaggcacatgatcgtattaaaatcatatcagggaaaccaggctcaagaacttactggatacaccagaccaaggacagggtataactctgtcacctggactcggtaaagtatacatttaacactgcaaggaacaacatattatcaaatacctggtgcgggcacgcatatgtgtgtgtacctgtgtgtgttcgtgtgcctgaaggacaggcgagagcttcagctcagcttgatcccccactgtgatgtggcagactcagctgccatttgcctgcccccctactctcccatcctggacctggcctgctctttcatctctgcagtcggctccatcttccctctctgccccacagactgccccacagcctggtctcaagagcaacagcttcttctgtgtggctggtatggggacactaccccattcataccttgtatttctatcagccggttttgtaaaacctctcaaactctgttgcagcccctttaacctacatccttccgtaagctatattgtgtgcatctattactattattccgtgtgatgggacagttaacattagtaatgaagattggaataagacaacgcaaatccttcatttgcctcagtcagattagcagtgtaggcaggattatctggcacactgctaccactgaaattactgagttggttgtcattcgataaatactgacactgggaaaaaggcataaatctgtctgtgtttttaacatagcgtgtacatagcgcatgcgtcatcctgatcagaggtgcaggcatcagggtggttttcataatttccgccccctttaaagccgggtggtggtggcgcacgcctttgatcccagcactcgggaggcagaagcaggcggatctctgtgagtttgagaccagcctggtctacaagagctagttccaggacagcctccaaagttacacagagaaaccctgtctcgaaaaaccaaaaaaaagagagttctctgctgcttgcctgtttgtttgtttgtttgtttttgtctctccctttagctactccccaaatcagaaaaacgccatatctggagtccctgctaaagggaaaagtcatctcatgctaatgcttcagaaacatcaaaaacattacaaactgaagtgtgcgaccggcaaatccccacctaaggaaataaagctgccaacgtctgggtttgagaatggaagccagctcggggatataagaagcggcagacactctgccattgagtcaagcctttgacaaatggtccttgatgaatcccaatttgcacagggatttgaaactttccatgctcttctatttcatcagctgctttcagttacttttaaaggaacacatttttaatgagaaatttctgacggagaatgcaatgcagatggaattctttgaacaattatttcttttgttggtgtcttctttttttccacaggacccgcttgcaattaaataaaacagtaattaaaactaaattcactcaaaaaatcgttgtcccagcaatcacctctgtgatccttcatcctttctttcctccgtggagagaatgtcttatcagagatccaatctaagacagagagcctttgatttttctaatgtggaaacataaattggaaatattctggaaacttatgattatagagccttcacaatagagtgaaaatctgaagatataaggccatgggatagctgaattctctttaattttttttaatttttgtacaaatttaaaacacattgaaaaatttagtgacagaagcctaacaggcataggcaaacacatctctcctagtgcagacatgaataactcagtcaaatttagctatagcgaaagtacatttctgagcctccctgaactgagaaagagtgtgtttaaatctgatgtcaacgccttagccgagtctttggggtatctcagagtgaccaccctcccttattcctgcttctctttcctgtcccctccctttcaggctctgtgttcccaaaggtcaccatcatcttccaacaatgcaagccagcctattccagggccaaggcagacctcttttcaggcctgataagctactcagcaaattcccattttctgcctttatttaaactactgtgttttcctatgatcttgaccctgatgttcactccccactaaccatcaaaccgatgtctctaagggtagttagtgagtcccttcccagttcctgagactcccttgacagaccagtgtggcatttcaagggttagtccctacttcttccctacctggttccttgggtgtgttccccagtcaggaacaggtagaaactcaactacattaagttgctcttggtttctccatccttagtcctcaagctatttcctctacagagactacaattctcccatgcttgtatctgccgtttgagtccaagatcaaccggaaaaactactctgtgaactgggttctgaggaatgacttccggtccagaagaatcctagggagtacaaaacgaagcaaaacaaaaagcccggaagtgatttctggcatattcttctctttctctactcagttgagtgtgcacactccctgcaaccatgtgtgtgttacagggatgtgcttgaattgatgaggcctgaggtcaatgtcctcaatttcttctctaccttagttgttgagatagggtctctcactgggcacagaagtcaccgatttgggtaggctgatgtgtgatgatgatgtgtgatgtaggaggtgacattggggttagtgaccatatctggaagaactcactgggagcagtttctcctcctagaagagacctgtgattaagcagcccgtgagctgtcatcagcccaaatgacaaaggtgatatagactctgagtgtgtggcctggaggtcacatcagggtttctcttcagtgagcaaagcaccaagaaacaagaatcttctgaattttttttttttttataatttggaaatcttgcctatatggtttattactggggcttagtttttatttcgaggtcttaaatagggttgaacactaagaaaggtttttccaattacatactcacagaaaggtagttcagctttggtgaagtcaggggaaaaattaattcaacggccccccgccccccacacacatacatgtatagtctcttagccttatatttagttagaaaagtccatgatgaaccttgtggaaatagctgtgagtacaggcgttaattgggtacattcttcaaaccatgtccacaagaaaagcatttgcccaaagctgttggacatcctgggatttagttctaagaatttagcattaaagaaaatggtctagatggaataactcggcgtcaaatctttttttaaaagaacaaataaccaagatgggtaaatggtgcagaaaccacatttggagaaaattgtactagctcttccactgtgtcctccttggtatgttgaagtaacaaggagaagtcctggtgtctagtctgttgtgtaactggcagtgtcatagttgctatcttgttggtttcatcttgtccaaaggttacagcatgtatctggcacctcagccaggatgcagagtcctggaaaactcctgttcttgaggaaaagttaaattttggagagtaataaagacaggtttttcttttctttcctttttcaatacaaagtcttttatatagcccaataagccctcatatcctccattcttttgcctcagcctttggtgtaccaagattacagctatgcatcaccatgcccaatcatgaagacatttttactgtgtttcttagccagtcccaagaaaagaaatctggaggaggacagggtatttattcagtttatggcttcagagatttcagtccatggatacttggttcttatatttcttgagcctgttgtgggagagaacatcacagcagggagaatgtggtgggacaaagctggtcacctcatcatgaaggaaaaggaaaggagagaggtcagggtagagaaggagagagacctctaaggacccactcccttcaagtaggtcctatctcctcagctatcatcagcatccaaaagcccatccagttatgaacccattagtaaagtcacccactgatgaggtcagaccctttatttattttttctcttttttttttttttctcgagacagggtttctctgtgtagctttggagcctatcctggcactcgctctggagaccaggctagcctcgaactcacagagatccgcctgcctctgcctccggattgctgggattaaaggcgtacgccaccaacacccggcagtcagaccctttataatccaatcatatcctaaaagccgatcagctaacaatcgacactttaaggacatgtgggagaatttcacacccaatccatagcactattgtttagtaatgtagaaataaaaagaacaaaactgtaacccaaacatgatagggatgtctatatagacaccaatgccatatgttgtatacacgggaaagattgagtccttttctcatcattgaagggcatcctctctagctagtgaaataacaaaaacatagtttaaagaaaggaaacaaaattaccctttgcatgtggtatcactgtctacttaaaaactcaaactcattaatgaaagaaactactactcatctaagaaaagaaaccaatagagcagactgagatataataggaaggaaacttccctgagcacaacagcaaacacattggagttgtctcaagatcccaaatggagccaaatgattactagccctcatgactcctgtttttttcatattataaaaataaatgctttgggccatgaaaatagaagaaagcctcatcagtaattagaaatcatgagtagtatttggaaaacagaaacaaaagtgaaagacggtgtaaaaagcacaaaaaccctaaccgagactgagtgaatgcaagaacagggtgggttctcacatcaatatttgactataagaaaattccatcgacaaacagatagagtacttgaaaatcgaacccagaagaaagtgattttatgagcaagtggaatttagcttatgcattgtatgtagagcacactttgtgatcctataattgaagtaaattagatacaaactttaatcgtgcttaagttattatctgtaaatcccagtacacactcaaattctaaaagggaagaaacaaaaccttaggaaaaggttataaggacaggttgacaaaatctctagaaattgccacattaattaacagaaatattatctaaatgctcttcaatgtaaaaatgagatggtcctttatcctggcaattattaaatattgtactagcagtactaacaaattaaataagattttaaaaatctgagacaaggtatcacttatttagcctggctggcgtggaattcactgtacaaactgagctggccttaagcttacacagagatccacctgcctccacctacttgagtgctaggatcaaaggcatttgacactacatcccactaaataagattgaaaacacttttggttccagcacttgagaggcaaaggcctaactatttcttgagttcatcttataacctaatacaatagataagatttcacttaacaacatcatttgcatagtttttctcatcccctgaattaatttcatggaatacatgggataaatgtgggggggagaggatagggaagtctttatagttgttgatacccctgtgctttctaaataactgtcctcagactataccaatgaatgtaatagtttccttgccagcttacaatgtcacctccagatgttccattacactccttttgtttgctgttgaggtttgtagattttacccccataatattcatattgtctcttgtgtgactcatctaaggacaattctcaattccttagtgataagctagatattaattaaaaaaaaaaataaaaccttcctagccaggccctggtggcagtggtggagcatgcctttatcccagctctggggagcagaggcagggggagctctaagttcaaggccaacctgctctacaacatgatacaggacaaccatagttacaatgagaaatcctgtctcaaaaaaccaaaataacaaacaaacaaaaaagggctttcttagatggcagacatggaattgtgttccgtatgttcgagagcatgaaactaagaaatgagggattttttccttcatttaagccagggagaatgtcaatcaataggagtgaccttctgagcctatacagggctgcttctagtccaagtagaaggtgaaaattagggaaaagatgacttcttcctagagtggcaagcccaggcctagaccggaggcttggaggacaaaaagctcagtccctgcattaattatctttctccttgctgtcatagaatacctaataaaaacacaacttcaagtaggaggtgtttatttgactcggagttcaagggatacagcccaccgtactggggaaggcatggcagcccagagctctgttcatggcaacagaagcttgaagcacaatcggaaagcagagcgttcaggcaggaagcacagtggactgtaaccctcgaagcctgccccctaatgatccacttctttcagctagtcctccctgcagtggttcatgtgggtcacaaccatcagaaaatacgtatttccaatagcattaggaacccccaactataaacttatttttgttgctacttcatatttgagcagtgtctcagttcctaagactatcggaaatatgtgtttttcaatggtcacgactcacaagctaagaactgctaaagaatccacaaggaccccaaacaatgctactcactacttggagaccaagtgttgagatacatggggggacatgtaactgtcctcattttgtcccttgaacagtgagcaatctgaccttaccttgcatgatgagtctgtgcttatgcagaaaccctggttttctttaaaaaacaaacaaaacacaaaacaggaggaaccctgccatttcctatctatgacagcttcggtttgagggaaatgtcacttccgggtcttttctaaggtttgggaagtattaaaagcaggttagttcctactaaggacccaggagtcacaagtaaggtctcctaaaagtaaatgctgtgtgtggtactgcttccagttagctgttcagtagccggaggagaccctccgaggctctctttcctgtcagttttagcatgttcaaagaactcttggggctaaagagacagctcagtaagtacttgctgtccaggcatgaaaacctaagctggggttccctagaaaccaactgaaatatgtgcacagcgagcttctaattccagggttggggaggcagggacaggaagacatactgggcttgccggtcagcgagcctagccaaaatggagagttctgggttcagggagagaccctgtctcaaaaagataaggtggagagcaatagaaaacacatccaacgtggatgtctggcctccacacatccacacatgggtgagcacatccttaaacgtgcacacacacacatgaacatgtacatatacatataccatgcatgcatacacacagagagatttaaaaaactatctctttatgtccacatccttgttcactggcctcttacgggtccccttatccttccaaggagaggcactcatttatttacaccatcagcatagcatgctcaagtctttcctagattaagataaacattcttttcatccttcctttgcctctcgacagctaggtttctaaataggcttgtggtagtttgaaaaacagggaatggcgctattaggaggtttgaacttgttagaggaagtgtgtcactgtgagggacttcgaggtctctttcgctcaagcttcactcagcgtgacagtcagtcaacttcctgctgctgctttctggttaagatgtagccagccccatatctgcctgcacactgccctggtttgctccccattatgatcgtaatggactgaacctctgaaactgtaagccgccacctgaagtaaatgttttcattggaagagctgccgtggtcatggtgtcgcttcacagcaataaaaaaccctaagacaagtctctatgccatgattagaacatctgtgctcactcaccccctacaattcatatgttggaatcaaatgcccagtgtgatcatcttaaaaggtaggaccttcaggaaggattaaggcatggttctctatcttatgaatgggtttaagaaccataccaggctacgaggagtagctttactctttccacagattgagaggacatagcaggcaccatctatgaggaatgggtcttcagatataggatgtgtttggacttcacagcctccagaatcatgcagcatagctttctgcattttataaactacagagtctcaggcatttgttacatcagcatgacagacagacattccacttaccacgtattcattacccagccggtgctaaccagcctcccatacagttagttcctctagtaatctcacacagactaaacgtatcagcttaaccccttctctcccaaacttactggacatttttcagaccttattcatattaatacttcaaattattgatcatctttctctcttgggaactctctcctcctcggtgtccttggttttatcacgcaagaatgtgtgtgttctgtgcggacaggactctgattttccagtcatcccaagttcccagaacatgcttttcccacaatagactcaataaatatttgatgagttgattacttactctttcctttcttggttcaactgattatttagacattgtcagtatcttctcacctcagcattcaaccagtgtgcagcttcagctttgaaaagaccaaccaaccaaataccaacttcatccttatttctagaattcctgaacctgtacttaaacaataatgatgtgccttagttaaggtgtctgttgctgtgataaaacactatgacaactaaatactttttttataagttgccttagtcatggtgcctcttcatagaaataaaaactaagacaccaatcattcagaaggggagatagtaatatcagaagatcaaagtcattctgggctagtgagtttgagactagcctggtctaaataagatcctatctcaaaaacaaaagaataaaattgtaaaactagaaatgctgttttatgtacaaaaactattaaaagattttaaatatttaaaatagtttcagaattgaagaggttgcccaatgagtaaagttacacaaacacaaggacctgagcttccaagttcagctttgcaatacccacaagaaatccagaccctgaagcatgcacctattacccacaacaagagagaggagactgggtcccagggaatcccttacaagtcactctagccaacacagtgagctcctagttcattgagaagctctgtctcaaaagacagaaaaacaactgagaaggacaatccaatgtcaagttctggcctccctgagcacctacaaggagagtacacatgtatgcaccagacatatacacacagagagaaaatttagttcataaatattatttataatagtttatagatgcaaactatgttagatatttttagcaagcattattacatctaggccagagctggtggcacacacctatcacctccacattcaggagtctgagacatagagttcatgaatataaagctagcttcagaaatatagtgagaccctgtctctgaaaaaaatccttttaattaaatttactcaaaaattttcaataaaattacaaataatagaagtcaaaataatgataagatataaatttcggtctctgtggaatttcttggtatactgacattcatataaaaatagagtcacttttaagaggcatgcttaatttccactaattaattgcattaggccatgagtctttcaaaaagcaatcctttggggaatcctttcatgtcttgtaaggataaattaaacggacaatgtcaactttgccacctcaaagcttcacaataggaaaagccctccaaattctacaagtgacctacaatggaaacaaaaaactgtgcacatcagttataaagaagccaacagaaaacaataaagtactccaaaatagtttcctccttgtggacatttgaatgaaaatgtcccccacaggttcagatatttgaacctcatttggtggcgctgttggggatgtggagctttgctggaggaattgaaccactgtgggtaggttttgagtgttaatagtttcactccacttcctggccgacttctgttccatgctcacattttaagatataagctctcagcttcctgctcctcctgctatgcctgctacttgctgccatgtcttctctctgccatgatgagctcttcaccttctagaaccgttaagcccaaataagctatctcttccatatgttgctttggttgtggtattttatctcagaaacagaaaagtaagtaatatagaagttggtattacaagtggggtatttatgtgatgaacctgaccacattggtttttggagaaatgttggtggaagactttggaactttggaccagaaaagcagttgaatgctgtaagcataacttagacattctagtagcattgcagactgtggaggaccagctcaagaggtttcagaggggaataatattagcaactgggctagagtccattcaaatgacatttccaccaagaatctagttgcctcctgccctggtcctaagaaattacctgcctggggctaaagttaaaagtaatgaacaagtttctttggcccaggaaacttcaagaatctgtggcgtagttgttaactgataactcttatgcaagttataatgaaaaagcactagtgggcagaaagaaatacaaaatgtgctgattgaagagaaataggatactaggaagcttaaggttaagccaagacctgtgctgaaagagaagatgtaattgttaaggacattcatgtctttaggaaaagctttctctgcactggaatgaagggaaggatgcccttagggccaggccccacccagctaaacttccaagttgtaaaaagcagtctaaggagttttatctctagatagcacttaaataaaaaccctgctgcagggggtggaggaatagccctagggctaagagcactagctagcagttccagaggacttagtgggtggtattaattcccagcatccttgtgacagctcttctggccccaataagcaccaggcatgcatgtggtccacaaacacacatataggcaaaagcacctgttaatcacatctggcgagaataagaccactaccacagtttaaagccaaatttgaagcaagctttaattaaatactagccaggtggatgggttctggccaggtccatacccagtttctgggaaatggccctgagtcacaatttgcagcagcttaagaaggaaaacccttcaggtgatggcagcacacacctttaatcccagcacttgggaggcagaggtgagtggatctctgtgtgtttgagaccagccagctctacaagaactagttccaggacagcctccaaagccacagagaaacccggtctcgaaaaaacaaaataaacaaaaaaaaaagttattaggagtcaatttaataccaatttagttatcagagtaatagtagtaggttcggctctagagccgatggcctatccagtaacaagttattagccctaataatggtgccaaatgggggtacaatcagaggcaagcatacagcctgatgtatttcctgcctacatccaatcagaggcaagcatatatccagatgcatttcctgcctatgaacctcctgcccacatgtgatcacgcacatttggtgcagatgtgtcaaataaacttgtttaggggagtgaaaaacatgtggcttgttatctcccataaacaacagcctccagcattttgggaactgtctgtccttgggcaaggggcttgcatatcagagggcatttttgtttcatggatctcttgggcatagtaattaaaacttaataagtaacttctgctcgcacacacccatacacataaaataaaatcatctttttaaaagctgttgctgatgtgattcaaggatgccaggagccacctcaagctggcagcagaacttggcagtgtcatctacatagcacacgctttaaaactatgaacgaatacaagagtgaaggagtcataggttctccttccacagtttgagagagccactgaagtcagatagtgtgtgacagaaagtccctctgtaaaagccccgagagaggccattacatgaagctgtgaaagtgaaacctagatttcagtgaagaccccaaatattgaagatgccaaagccagggatatctgccaaggagaactgtatacaggaagtagaactagcccaagagtgggatgtattttacaggcagtaaagctggagaggaaaagccatccaaaccttctgataccaggcatggagctatggaatttggtgtttgacctgctagattccagtcttgctttggttagtattgaagggaccagctcccctttcggcagccatgacagtaacacgtgctcgctatgaccttatcttagtcactagaggttaggtgcctgccttgtgacaaggaaccaatcagaagttagctggtggcgctgtgctttacgaccctgggtgtgctttacggacaagcacacagcaatgaggcacagagcatagcaaccaccctgggaggacctatgggccataacaaccagttggccaatcaacacagggcaagccctccaagcctggaggcacaccaatcgtgagcctctgtgtacccctagacactctccttacgctgccctacaagatccgtatgcagcggcttagaactgtcttttgggagtcatccgcaatggagggtgggtgaaagacctgagctaacatgggtttagctcgttaaaaaacaataaagcctcacgcagtttgcagcaaagctcttgaatctgcctggtgattggggtgaccgcggtcatggcctgggcccccggatacctgaattttcccggggtctaacagtatttccttactaagcccccatttctgccccttggaagataatgcatggtttggcctttatgtgttggaagtatgtaatttgctttttttattttacagagggttacaattaagagattgattgccttaagccaggcatgatgttacatgactttaaacatatcattcaggaggcagaggcaggaagatctctgtgagtttaaggccaatgtggttgacacagggagtgtcaggacagccagagctacattagtgagctccatttagtaaaagatgaaggaggaggatgaagaagaggagactgattgcttgaagtcttagagagacttacttccaatttttaaagcattattgacaatgaaattttaaaattgaactaaatgcatttttttgcattatgatagggccatgaacctttggaagtcagggagtgggatgcagtggtttgattgaaaatgtctcccatagtaatagatcagtatttcccgtagtacacaaatgaactttgggagccctcttcacatagagggatactctctcagcctaaacacactggggagggtctagaccctgctccaaatgatatgacagactttgaaggttcccccatgggaaggcctcaccctccctggggagcagaaaggggttagggtagggggctggtgggggggccagagtagaggggagggagagggaactgagattgacatataaaagaagcttgtttctaagttaaataaaaaaaagaaaaaagaaagaaagaaaatgtctcccgtaggctcaagaaattgaaggcttggtcatcacttgatggtgctgtgtgggaggactgtggaaccattgggaggtggggctttactggaagaagtacatcactggggcaggttttgcaggtttataattttgtcttactttctgattgctctctgctccatgcatgcattttaagatctgacctcagcttcctgctctcgctgccatctgctatctgccgtcatgtccctctgttgtgatggactctcttgaaccataagccctaataaactacctctttggtatcttgcctgggtcatggtgaagggaccagcccccccatttcggcagctatgacagtaacacgtgctcgctatgaccttgtcttagtcactagaggttaggtgcctgcctcgtgacaaggaaccaatcagaagttagctggtggcgctatgctttacgaccctgagtgtactttacagacaagcacacagcaatgaggcacagagcatagcaaccaccctgggaggacctatgggccataacaaccagttggccaatcaccacagggcaagccctctaagcctggaggcacaccaatcctgagcctgtgcgtacccctagacactctccttacgctgccctacaggatctctcagcagctggttcaaactgtcttttgggagccatccgccgtggcgggtgggtgaaagacctgagctaacatggggttagctcgttaaaaaacaataaagcctcatgcaatttgcagcaagctcttgaatctgcctggtgattggggtgactgcggtcgtggactgggaccccggatacttgagttttccgggggtctaacaatggagttttatcacagcaacagaaaagtagctaatccacttctccactgatctcaaccaaaagcaaaaggtaattcaatattgtaatgtgctcatccattctttttttgttgtttttcgagacatggtttctctgtggctttggaggctgtcctggaactagcccttgtagagcaggctggtctcgaactcacagagatcctcctgcctctgcctcctgagtgctgggattaaaggcgtgcaccaccatcacccggttgtgctcatccatttttgaccacaggagacaaatgggaacagatttgaataaggaacaatttactctgtaagattttcaggttttacataataaaatagtaataacaattatacttaaaaacatgaatccagagctgtggtggtagcttggttgtgaacacaaacagacaaaagtttgaatcccagcccatacatgtcatgtgggcatggtaattctagctttagaaaggcaaacacaggggagtacccaaagcaagccagctaaggagactagacaaagcaatgatctttgagcatgactgagagtctcttcctcaatgactaaggtaggaaagagatcaaaagtgattcttgataccaaacttggaccacagacacatgcacacatgtgcgcatactggccacacatactcgtccatacccaggtgaatatacagacacaccacacacacatgaaaaggagaaaataaatgaataagaatttcaactttatttcttaaatgttagaaattcattttgtgataacttattggtttgaggacaaatatagcttttaacactaagccagtgagaaaaatcgtctgtttataaaccttcctttctttgatgacttcataatattgatttctcaatgagaagtacagcaaggaaataagtgtgttaacactgcaatcagactgtaggacaagacagcctagtttcttcagcaaatcaatgggatccttgatgggatggggggggggggtgcggcagggcagaggtttcaggtgcacagacagaggcaatctaaagaagaaaaagaaaattccctcttcctctcaggaccatgaggacccctggcttgctcaatagtagcctagggatctaccctacggtccttactgatccttgtcatttacattcccagcaccaagtcctacccattctatttccttgggattcctaaactccctttccactggtgcttgaccagggaagggaaggctttctctcctttcttctctacctgacctccttctcatcaggctgtcaatctacattttcatgcctcaggagagctgggcagacaatcccagtaacacttgtcagttctagttgatgttaagtgctggtcctaagcatgaggctggtcctaattaatttccaaacacttcccagtctcatccttacactatacccattcactggtgcttgaccccacagagtgggacatatgattctacaaacacaacccacaaatatcctgtgcaaagtgattttctgccttgctctccattcacctgttccctaacataaacccactctacttgaaataggtcaaatgtctttttcctgatgttctccagcagagcacacaatggtttataaatgctgctctacaacgtgcactatagacagttgcttgggcacggttcgtacactatcaattctgcatctatctcccgaagccctcaactctcacttttcctctcctctactctgtatttcacataacttccttccccaggtccaccttccactagccctgagtaaacctggctaataaaagaaactagtgaaagattaaaagttccaggtcttgaagtccaaaatcatgctccttctccctcagcttcctgagttgttccaaacaccacagaaatggcttttcttctccttggctcttcctccctccaggaccaactcacccagtcaggtcctaggtggttctacatctcactacacaattgtgatacccctagactgtggccctaacctgaggcagcagcagtttcttcccttacttatctctaggttgcttacctccacgtatttagactgcagtctgactacatacccattcagcaaaataacagtggattccacactaggcactatgaccttcaaagctaccagctcttgactaggtttacagcaccaggcatatgttgttccctcttgtggagtggagcagaaaataatttgttacccccataacagtcatgccactattatactgatgggcatgtcttgccaggctaatgaggccccatctcttcctgaggaactactgacagataatggtggctagagaaagaagtgtcaatttctttgtggtagaaagagggagagacggggtagaaatagctaaaactcattgtatatatgtgtgaaacattaaagactaaaaatatattagtgtctgccttagtcaatgttctattgctgtgaagagccaccatgaccatggcaactcttataaaggaaaacatttaattgggactggtttacagttcacaggttttgtccattattatcgtggcagaaaccatggtgacacacaggcagacatggtgctggagagtaactgagagttctacatcccaatctgtagggtacaagaagggagagacactgggcttggcttgagcttctaaaacttcaaagtccactcccagtgacacacttcctccaacaaggccaaatcaaccccaacaagacctcaccccctaaagccactcctaaacattcaaatatatgagcctatggggatcaatcttattcaaaccaccacagagcttttacaaatacttgtacacaagaacgaacagacacaattaagctcagttgtaagcaaattcatatgcctgtatctctctctacattttaagagttgtgtgacagaaagattctaatcaaaacatgacaagagagatccaagcaaaactgagaccctgtgtacaggctggaaattcttctaaaccactgctgacccctggccttcttcactaagatcaaccagtatcccattagaaagtttcagccacaaaataggcattctttccttgtgattcatattacccagaagccttcagcttcccagaatttgtgttaagcagtaactttcaaagatgataatgtttgccaacaatccctggggcactgccttatattttcctgaaacaaagggggttattctgttcatttttctcttttcagcagccttttgcatacattagcttttcctcttctggtattaaatagcagtatgtgcctgctaccattatctttaaaacctcggttttcttataaaactattttagatttgtgtatgtgtgtgtgtgtgtttgaatcttttgcctgaatgtgtgcagtgtatgtgcctgcatgtgtatgtagttgtgagcctccatgtgagggctggcaatcacaccctggtctttcacaacaaaaagtgtccttaaccaccgagtcaattctccagcccaaaacctcagttttcaatttatgtttcctcacacgttcgcaaacatcatcttacccagcctgtgggaactaccttactacttgttttgagaaatacaagtcatgagaatccaagtataaataaatacttaagaatttgattttgagcaacttccagcaattttacacccaattatattggcttgcaccctcgtcacaaacaatatgaaactctgtggaaagaaaaagtggtactgtggttattattgacctaatcaaatcttcctgctttctgtttataactttgcattgctcttctctagcttaatttctaactgtatgaataagttatgttttactgccacagatgttatgattgtaagtttcctacaaaaccagttagaatgccaacatctcctctctgaagtgatggtggtgctgctctgcccagtatactctttctgtccgtggtgtagttcctcctgcaatattccaaatgacactgtagtcattattacatgtgttttaattttattaccatactttgaatttctttttaccatactttgaattgctttaaaaaattacccgtgttcttactgtgtcatgtttaaatgatccatgactaaagattttatactaagtaaacagtgctttaaaagctttagaaagcaggttgtggtggtgcacactggtagaatttgctgaaggaagcgaaggcagggatcatgaatttgagcccagcttggatatatatattaataaaaataaaaaataaaaaataaactttagtaaataattaagatataattggggcaaagctttgattgcatttgtgttgcatctgatacatcacataacacaacttccctcactctctagctcaggaatagatagatattctttgcctagaaaattcttacttatcacaggaatataagtctcatgagaataaagactgtgtctccattgtttccttctatgtcctcgaagtctggtagttgcgctctctctctctctctctctctctctctctctctctctctctctctctctctctctctctccaaaatctgagacaatgtctttcaaatgacccttctaagatttttagtaatctatgtttaaccctgcatgtgtataaactttctatgcatatacatacctatgtgtctttgttaggattcctattgctctgatgaaatgccatgaccaaaaagcaagttggggaggaaagggtttgtttggcttacacttccacattgctgttcatcactgaagaaaatcaggaaaggaactcaaacacagcagaatcctagaggcaggagctgatgcagaggtcatagagaagtacttcttactggcttgctacccctggcttgttcagcctgctttcttatagaacccagttcagggatggcaccatccaccataggctgggccctcccattatcactagttgagaaaatgccttacagctctatctcatggaggcatttcctcaactgaggctcctttctctccgatgactttagtttgtgtcaagttgacacacaaaaccagccaatacactatgcatatatactttctttttaaagaatatataattccctgatgggggatatatatatatatatatatatatatatatatatatatatatatatatgtttttcttagtagttgatgaataaaatactgattggccagtaaccaggtaggaagtataggtggggctaccagacaaggagaattctggggagaagaggcaaagagaaagggccagagggagacatcatgtagctactaggaagataggatgctcttggcattccctggtaagatatggccatgcagaaatacatagattaatagttatgggttaataattaagagagagctagccagtaagaagcctgagccattgaccaaacagtttatagttaatataactccttatgtctttatttggggctgaagggcaacaggaccaggctgaacagaaaccccatcctaaaattcccattttatatatgagcaaactcaagatcagagacctttagataatcaagttacaagcttgttaaatggcagattttgcattctgattgctaataccatagccatctatttaaaacaccacagtggttcatcatttctagatgctcaaaactttcctcggtttctatacccagaagctagaagcatattccccagggctaccatgaattctgtcttcttctgtgaactacttttctttccattctttactttgaggtatggtctcccgggaagaggcttctgccaatggtaagagtgctctttccggccttgcttcatgtgccatatatgaaatcagaatgtgagcttatgtccttcagtttctgtacttttataaattctccccaaatacatacatgttctgagccaggaaatatggtgtacacctttaatcccagcacttgggtggcagaggcaggtagatccctgtgagttcaagaccagactggtctacacagtgagttctaggatatccagggtgacataatgagagcctgtcttgaacaaacaaaagaaaatgcatatcaatactccctccttcctactactgtgtgttttacttgtgatggccacctcttttctaataattattcagttatcctatattagctagttatgtggatgtccttctgtaggctgcaaatacacattgcttttgttggttgatgagtaaagctgctttggcctatggcagagcaaaggatagctaggtgggaagttcaagcaaagatacagggagaaagaaggcagagttggagagatgccagaagctaccaaggaaacaagatatgtagaaaatgaggtagtgccgtggccatgtggcaatatgtagattcatgaaaataggttaggatatatatatatatatgggatagcttgagccattggccaaacaaatcataattaacattaagcctctgaatgactattttataagcagttgtgacattcggtgatacacagaaaacttctgtgcctgaaggtggcttgcagctacctttgcattctgaaccctcaagcaagctttattaaatcatatgtaatatatcaccacaccaaactctatgcacacatatgataaaacttaatttctaaattaaggactctcaatttataaggttaaaaggaacaactaataatagagtataactgttatggaatagttatggataaaaatgtactctagtaacactctctactactgtgctttggagcccttactgggtgaaataagagtgacccaaatacaagcattgctgtacttcaactgctgatctgataagcatgtcagttataaataactaacgagcagagagtatatagacattagtcaaaggcacgtcacattataggcaagatggaggaagcgggcatgagatttcatcccagtgctcacaatgacgtggaatttaaaatccagtaactgtttatttctaaaatttcccaattagtatatctagactatacttgaccattcaaaacctacttaaaccaatggcaaaattctgtaatagtgtgccagtaaaaaggaagattacaggtaacatggactactataaagctataattttcatctctttgattaatgaaggactcagaaaccacttgtcttaattagggttttcagcactctgaagagacaccatgaccattgcaactctaataaggaaaacatttaattggggtttgcttacaattttagtggttcggtccattatcatcatgatggcaggcagacatgctgctggagctgagagtactatatcttgcaggaaacaggaagttaactgactgtcacactgagggaagcttgagcaaaaaaggccttagagcccaccctcactgtaacacacttcctccaacaaggccacacctcctaatagtgccactccctttgagggccattttcttttgagggccatcacattactcaagtcaaatctactgagtctcatcacaggcaaacagctttcctttcaccttatatgctgtatactcctctgattgtctccttgctatttgatacttagcccaataggtggtgacaagatttagcgttttgttttgtttgtttgcgtatgttgttgttaaacagacatgttttttggatactttgagataacatgaaaatctgaagatggaagaacttcaattatctgtgaaaacaccagcaagtgaaacttatgtgtatgtagtgagagatggcaggaagaaagtccatttattctgacacaccctagaaaatacccagtgtcagttatcttcatcatagagtggagactaaaactaaacgctgagttttggaatccagctctctccctcacattgcaaatagacagacaagcatctcaattgttctcactaatatagaaagcaaagacagggagactcaaacaaactgtgtaacagaaattaaagatgggggaacaacataaaagcagaaaaaaatattgaaaatttaaaactgtatatattcttcccaaaatgatgactgtggtgataatccatatcaggatgccgcataaaaagaaagacttaggatatgagataaagggccatggtggcctgctagctgagcatacacagacagggtcctgggttccatctttagcaccagaaaaagaaaatcagagaacaagaataagattctggaaatgaaaatatagtaaaagccctttagaggcagacccacagaaggatttggtctaacctgtggtccaaacagttatgaatgccgcccaacacaaaatcacaacctcatttaaacattatgagatttgttttaattcagttgcacggttctgtagcatgaacagcgtgtcacaatgtcaaaaggttagacatggctgatagaagatagaaagaaaaacaaagggaggaagaaatgcagaagagacagcagagaacatggtgggagagtaattatcctacacgtacgtatgtgtgcacacacacagacatgttacacaagagacatgctcatggaattctaaggcatccaaaataaaaagatcctaaacagtcctagagagagagtgggggtaagtgtgtcaaaggcaattgacatccaagtgccaatggctttgcaccagtcatgtgagcaccaggcaacagtgtggtgcaaagttggaactggcttcctgggtttgcatcctgcctttactcccttgtgataatctgaccctgcacagttgattcctcatggggaaaagaacaactcctgcctcagagagtggttaggagccaaacagggtcgggcacctggcattttctaagtactttataactgaactctaagaacacaaattgagcaagactttgaaatcctaaggacaaatgagctgccaattcaagttcagttcttaactaaaactcttaagcaggtacgtccaggaaaaagaacaaacaaaaaatatgttctgctgcaaaactattttaaaaatttatttgttccatctttttcctcaggaagctctagaaccaggggcagttcagagaaaaggatgaaggcacaaaagaggaagcaagcagccatggcagcaaacacctggaagccccacacctgttagactggagtagaattgtgagtttaaggccaccttatactaaatagtggggagagtttaatctcaaaaaagaaaaataaaagaagggagggagggaggaaaggagggagggaagcaggcaggcaggcaggcatgaatagtacagctagaacacaagggatgtaacactagaggaaaacaaagggtccacagggacagcaggcctagagagcaccctgtgaaaatcagaaggctatctcagaacacaaaagagaatgaatggataggtgagttcttgctggatcggagcataaggaacttcatactaccaggagagaaaaactatgaagggtttaaggtgcaaggaaatgaacaaggcaagcaggggctggagaaatgtttcagagggtacgagcactgactgctccatcaagggacccagattctactctgaacaaccacatggcagatcacaaacatctgtaactctacttccaggggatcccgtaccctcttctggtctccatgaccaccaggcacgaatgtggtacgcagacatacgtataggtctatatatgtatataaaacatctatatacataaagtgaaataataaaagaaaaagtcaaggcttgagagccagtgtgttaaatgccacctaccaaaaaagaaagtcaatgcaatttctgaaattaagaattatttatgtaggatatagacatgtggagttgaggatcagaaaatagacttactccagatagcatgcacaaattgtccttgagtttccttactaatcctgggtaccactgaaacttctctttaacccagctggaaggccaataatgtacatatccattctgaagggacatgcaagcaaggctaggcctccttgcctggcatctcacagggatagaaaacttccctgttttgtcctctattccaggaaggcagtttcctgagtccagtttgccatttgtttggcatgcgggacactcagtatttctgctactggaagccgtctaccattttctttgtaccaactttgcactggggttatccctcttctgaaaggctcccttctgccttaatgtgaaacactaagttaatgagaagataaagttcaaaacttgtattctcttggatgctgtgtatcacacccttgttacaaaatattctcaccctagctccttttttactattattactgtattttgtttgtttgtctttgtttttgttttgttgagacagtgtttctctgtgtcgccctagctattctgaaactagctgttgtaggaccaggctggcctcaaactcacagagatccacctgcttctgcctcccaagtgctggattaaatgtgtgcaccgccaccaccctgctgttattactatcttttttaaaggatttttctcatttttatcagacctttgaaaaattttcgtatgtattttgagtatattaaccccctcctccccctcttcccagatctgtttcccattccctacccacccaactttgtgggcttttaggtttttggttgtttttttttttttactcaccaattggtttgtgcgtcttcagtactcttggatgtggggacttagctagagtctggttaacccttgaagaaaactgactctccctctcctaatagctatcagttgccaactcctcaggtggggctgggaattcgttccgacctccccaattcatgctgggtttctgtctggcgtgagcttgcttgagtcttgtgcatgctgtatgttcctatgtgcagctgccctgctgtgttcagaaaacattgtttccctgtagctatccaatgcctctgactcttacaaattttccaccccacttccaaaatgattcctgagccctggaaagaaaaagaaatgtgatttagataatcacttttagggctggtcattccaaagtaccttatttcctgcaccttctctaatgaagaagcttctctaatgaaggttgagagatgcactaatctaataacaataagttataaggagtcaatttaatactaatttagttagcagagtaatagtagtaggttcagctctagaattgatgacctacctggtaacaagttattagtcctaataatggtgccaaatggtggtttcaacatgtggagtaggccttaaattcaatcagaaagtggtttgttactcccatgatattcatgtcactattgcaaccaatggtcatgtcttgccgggacaattgttgttgtagctcataaaatttgcagctaagcaaggctggtgatttcttttctcctcaagtattatatatagcatcttccagcattttgaaaactagccactagggatgaagcttccagatgaatactagctacctacagaaagcaatttaccaagtcaattcaatcttcatcacaattctaatgcaattcttcacaggaattgaataatcttaaatttcatagaaacgtgaacaactcggcatagtgaaaatcatgttgaacaataaaagaactactagaggtattaccatcccagataccaagttatactacaaagctgtggtaatgaaaatagcacaaaattttcaattccaaatacatcaagaccttaacataggacctgttgccctgaatctgatagagaagaccgtagagaatatgcttgaactttctgagcaggaccaacaattagtaaaaaaagaaaattaaccattaaggaaacaacccatttttaaaaatgggccgtagaaactaaacagagaggtctcaaaagatgaaatacaaatggctgagaaacatttaaaaaatgttcaacatcagggagattcaaatcaaaacttcttagagatttcatcttaccccaatcaggatattaagataaattttaaaaaactaaaaaacaaaacaaaacaacaaaaagcatacacaaatgctgctgtgggtgtaggggagggagcacctattcactgctagtgcgactgtgtaaattggtgcagcccctatgaaaatcagtgcgaagattgctcaaaaagtcagaaatagatgtaccatatgatccagctataccactcttggatatctacccaaagtactctatatgctactatagaaatacctgctcatctctgttcatttctgctctattcagccatgaaaaggaaacagctggatgtcctatcacctgataaatggataatgaaaaggtatacatttacacaatagaatattattcaggccttaagaaaaaatgaattttgaggtaaatggatggagacgattattctgagtgaagtaatccaggcccaagaagacaagccatgtgttttctctcatttgtggatgttagctttgagtattcagatatgtgtttcatttggaatactcacgaggtcagggaattattaaggggccatgggaaatagaacaaaatgatataaaggggtggagggaagtaagaaaagaggaagggttacatggggggggggaggaaaggcagagtagaggaggaagtataagaggaacaactaacacttggcccttggttttgtttctaataaaggagaatccatgctgcctgtttccaagctgggatgattgtctttagaatggaagctatgctaccagcttccctactctgtcttgctgaacattcccatacagaacttaaagactgaaattatctatctttcttggctcttttgcctgccatcataccttgcaatctaccaagcctccagaagatttggaggggaaaaaattgggaactatttatctggaaattcctaatacaattatgtttccaagaggctgggaaaaaaataagagaaaaaaatcttttatttacctgtatcctttattttttaagttttgttttatttttaagtgtgtgtgtgtgtgtgtgtgtgtgtgtgtgtgtgtgtgtgtgtgtgtgaatgtatgctacatatgggcacctacagaggaaaggacaatcagatcacctggagctggagttgcaagcagttgtgagccacctgtcatgggtgctggaaaccaaaatcagggactggaagtgcagcaaatatttttaaaccctgagccatctctccaggccctacctgtgttctcctatttctagtattctttattcatttgtagagaaatgaacaagacctttttcattgtaacaaaacatcagagagcacatgcactgattgccagattctatgatagaaacgttttttgtgatactttcaaggcacagtgttgggtcgctggcctaagtttcataggtttaatgggggagaagatacgaaatttctcttcaggaatgagaaagttaatgtgctagaaataccaatttctgatattttgaattaatgtctagaaaggttaggaggcccagctatatgttttaccttgcaatgtttagctgcaggatatagccacctgcaatgtgcacatatagctaaatgtggtggagagaaaaaaaaatgagtgaatgagctgtgagaaagtagagacaaaagcaaatctttattttgagtttttagttttaaaaaagaaagtacagtcatatcaaaatacaatgcaacgtaaaatctcttcttttattaaaaagattaaaattaggaatattgattgtaggcagaattttctgtcctggcagtcagctggctctgtcctgccagctggctcccaaataactacacagagatgtattattaatgataaatgctcagccaatagcttaggcttgttactaactagctcttacaacttaaattaatccatatttcttatctatgctctaccacatggtggtaccttttttccagcccagtgtgttcacctcttgcttcctctgcatctagctagcgactctgctctccttcttcccagtgttcttagtctggctctcccatctaaactcttcccacctagctactggccagtcatctctttattaataatgagagcaacacatagtattcttcataatatacataaggattattccacagcaaatgatagatttcccccaggaaatgatccaaagagaattaaatgttgtaaataaggaaagaacaagattatccactaaacatgatctgtctttggaaagagaggctgagaaatggagcacaggacaagaagtaaaacatggtacctggctagtctatcacatctttggtaaaggtcagatgagcatacgagtatttaaacctctcctctgagcctcacataatgtaatactagttctctacaacagaggcttccaatgttttatggcacacgggtgcctttgggtttctctacactcaaggaaaatgcttagatttgcactcttgttttctagacttgttctttatctgcccacattttgtatacggcaggtaattgccagccggattcttaactaaaagagagctgattacacccagcatgttacataaaaactattttcaactgtcttacataagtgttgcaactatgtccatctgtcatgtagcaaactgtacacgtgatcatacaagatttgaggtgatttaaagatggcctgtatggccttcaggacagctggtactcactgggtcatttttccagtgtttgtaaaaactgcctgctaccaaatatgttaaactatttttctgggaatttatgttaaatatactgtccttcactacccagaacccatctctctagagagataaggcattctcttttcatttctgtgtgcctgaactctctcctatttcccttaatttagagtcatgagcagtgttgctcatgactctgagagtccattttaaaattcctcagcactctgaaaaattattttgcttggacattttagataaacatgcttgtgtttgtttctcccaactgaatctcttataccagtcatcttcaaaggagggccacagtccctgaagaacagagctgaaacccttttcaggaaacaactgacatttgttgccagtgacagaattcaatctttttatactatttcagggtcttggatctgccattatgaacttgacaatcgagatgtgcaaaacttagtgtgatagttaaccttggttgtcaattgactgtgatctggaatcaactgaagacaagcttggggcataaccagaaaagatgaactaaagaaaaaagagcctctttgagtggatagcgccttccagatacagaggtcagaggttagagcagtgtgccctcctgcatcgattcttgctactcttctgtttccatcagactccagcttctttaacccccaacatgcattgaagaccaatgactccaggaatcttctagattgtcagcactgaattgggactgctggaggcatccagctttctagactgagctgggctctcagttcctctaacccgaatccatcccatagtctctaaaccagccttctgaatcccaaactccctttcaatacatctatacattctgctggttctgttcctctagggattagtgcccaatatgcatactgaaccatcccctccccacaaattattaatgactgaagtcacaaaattgagcaagagtacagatctattcacagaacaagacaagaaaatagtacaaaaagttcaccctgggtttctgattccacactttaactttgaagaaactacagctggacatggtagtgtggttcagttatccaagctctcagaaaagcaagacaggaggattgtggctttaggtcagcctaggcaacatagtgagtccaagaccaacctggctgtatatattcatatacatatacatatacatgtacacacatatagataagtatacttatctatataatatatgttatatgcattatatatatatttagagagagaattacaactttactgctttgataatcttaaaagacttttaaagtgactcttttaaaattgtatgtgatgttacaaccagaagagcagaccacaagagatcaagtattgacgtatacacagaaagccaggtgctttctgctaagccaaatattcaagagatatcaagaagtgttttcaaaacaacaacactcataactaaaatttttgcactggaaaatgtattttttaaatgcaataattatgtatgtaatggcttattattttaaagcagtaaatatttatcagataacaagtaatctgtttagtttcaaatatgttcaatatcagtaacaaaccctacttaagacctttaaacattacaagagtgcaaaggggtcctgagaactagggttcagatccaccactcacatccatgattctacccattccagtttgcagcctatgctcttaaagaaaacgagatgtccaatttgttgtataggaattaacacatgcataattaacctaggcttagcaatcaaattgacctcttgtgttgtgttacttagtatcactgtgacaaaatacttgaggtaatcaacttaaaaggagtcaaattatatctgagcttacagttttgggaatgtcagtctgtgggttcatggtcagtttgaaccaaggcagagcaggaggctaatgtgtccacaactttggagtaaatgccctgatgtgaccttgcacttgtcagaacagcctaccagcaaggagacctactgtcaggagtaaaagcccaacaggcccttaggcctttgtctcagcctgaatttaccatctttcttacctcgttttggccccttcccctgtgagggcacaattgctttaactcatcttgagaagttcccaggcattcactccttatgtaggagtctgatgcaaccaacaaccgattgcagatactcttggatctgtcaaacaaaacgtaagctagcctagatggaaacaagatcattttctctgatgccatctttctacggaagttttggtacatggtctagtcagctgcacagttccatttcattttactaaatacgactgacttaatattactcatcaagttaaggaattttcattaactttgtctcttaatgttcccccatgaggccacaatagaacagacccaaaggccaacttctaaatttgaactgatgaaaagcttcttgaactctcaaatcagactaatggcttcctccacaggatacatcctgcaatggacagaggtggcaaagaaaatatctatcttgctgatgctgatgacaaagcctgccaagtttctttggatgactgtgctcttcttctaataagggcaaaactgcccccaacaactttttggacatggcctcgttctacatagtcctgtctcagaaattactatgttagaccaggctggccttgaactcagagatcttcctacctctacctcccagatgctgggacatgagctgtcatactcagcctccccaacaattttctgaactacttttttttagtgggaattgtaattctactaacaattttagttgggtgttatagagtctatttcactcacatagctatcttcaaggatgcctagtcactaaatggctgtcactaaatggttaagtatatcaaagccccttactggccctcctcggaggcactctgctgcctctccctgttatctttttccagcttggaagaagttagaatggtctgcacctcaacacagctaacagtcgttagggtgacctttgagaggggaatcatggactgggagttagactagcccttgattggtacagagatttttagttgctatctgaggggtaggattccgtacttttactctgctttgatcagaccatgagctcctgacagcttctccaaaattcacctctaccacttatcctgctctctgttctgccttgctctcgcctaccatctcctatggttatctttgttcccacatcaaaccattgcactcgctcctccttcagcataaaactttctctgacttctaccctacagtaattctaagcttcagaacaacagacttgctgagtggctggttaactgaggaccaacactttaaacaatctgggtatcccagttcatataacaataatggacattatttagtgactttcacaccgtattagcaaattagaattcaagttctgtctactgatacagacctttatatgcccatgccttaccaatctagcctgtcaagaattttgtgacttgaatgagtaaatcttggcctttttaaagacttattttcactttatgtggctgggtattttgcctgcaagcatgcaatcccgtggagaccagaagaggatgttggatcccctggaactagagttacattcggttgtgagctgccatgtgagtgtgtgagaacaaaacctgagtcctctgcaagagtagccgcgctcctaaccactgaaccatctctctagttctaagtgtttatctttcatgtccattttgcaagatttgtatcttacactggtttgcttttattattatttctaacaaagaatattgtgtgacttcatgttatacattatttcagagctttgctttttgcctgttttgtatttgattctaagagatcctggtcatactatagcagatgccagactgctctgtgttcaaattcaattcagtactgcctagctgtgaacttgggtactttgtttttaagcttttgtgaacaagatcatctactctaaaggaaggtaaagcatgtgttttgtaaacagcagactcaaagccaccaggctactactcatctgcatctctggctgccctttactataggttaagctctccctatactttcttcatgctgttctctggcttcagcttcattttttttccccttgtactcctgttttgacttcaggcaagtaagattgccttagcacagaattctcatacattctaaatgagtcttcaggttctgaagtttactttttggagattcaatcaagttgcttgagattttcaagtgcctcttagttaagattgtatacctgagtaaatcatgttatgacattgttttcattttactagatttttatagaagcaatgtctcagtcttctctatggacagctgaacccattagtgtctactgagtctgacacagggaaattttaccttacacctacacttttaccaaagagtaaatcagtcatttaatgtagagcacttacagccagcagtgcgcttgggatactgaaacaggagggccatgtcttgtagtccagctgggtgacataacgagttcaagaccagcctaactacatggtgagtccttgtcttaaaacaaaaaaagaaacgagtatttataatgctaaaatacgacttttgcctgttatttctatcataaagatgtcctgttgctcatgtggctgcaccttctggagcacttgttaaagaatggcttttatgggcaggggagatgcacagcaggtgaaggcacttgccaagcctgacaacccaagtttgatttctgggacccacatagtgggaggatagaacagagtcaccacgacttgccctctgacctccagagtgccattagcaaacatttgcacgtgcataaacacacacacacaactgtcataaataacaaaaagaaccagcttgtggctccacattaaatgtttggttttctaccaataacattctgaaaataataaataaaattaaaattttcagacttttgagattataatttagttatgccatttctcccttcacgttcctccctccagaaacccttccatatacccatttcctctttcaatttcagtctctttcattattgctacatgcatatatgtatatgtgtatacacataattcccaaatataacaagtcaaaatccaatagaccagctcaggaaacaacctatgtagattttgacagttaaaaggggagcaaagagtcttgtgataaatttttgtagatttacataaattctctcccacttggaaaactcactcaatgatttcatatcatgtctgaacaaagatgactttcatttaattgtatatctatttttaaattaagaattatgaggggagcctggcgttggtggcgcacgcctttaatcccagcactcggaggcagaagcaggcggatctctgtgagttcaaggccagcctggtctccagagcaagtgccaggataggctccaaagctacacagagaaaccctgtctcaaaaaacaaacaaaaagaggggaaaaacgaatactcaacattttcccagggtttcatacctgggggctgggaagatggctcactgaaagtgtttgctgtgcaagtgtgaggtctgcagccaggatcccagcactacatgctcagcagcacacccaccagtaattgcagatgaactgaaaagctccatgtttagggagagaccctgccgcagtgaggagctatggtggaagacaatcaggttaacttctggtctccacctatatacacatacactgtcacacatgtgaacatgtatacacagaaataaagatttcatacccaagtctatggccctgatctgaggggaggacccagttactagcaaactgttgtcgatgtaatgagtgcacaagttacaaatgtccattatatcagattactaaactgttttggatcctaaccttgagatgaggtgagaatggtgggaatttcatctttgtgtgaaaatattgcttctggtatttagatattggtatttttccagatgtttatgagttaagtatacgtgtactatatatgtataacatatatatatatatatatatatatatatatatatatatataacccatttcctgagtaactcaaaattggtcattttctatcaacaaatcttaaatggcatggcccttcagtttcccagaaatttttagaaacttttagcttctgaaaaatgagttttcaaacacacacacaaagaaaaataccaaagaaaatttaactctgagaagaggaaccaattgtttaagttttatcaaaccaatttagacaacagaatggtcacggctacttagggtaggattattataaattctccttaactatcctaaacattttgaaactcaagatgtcagagcctgaataaggttttatggaggctactgagtacaaactgcctcagtctattgaaatagcactcccgctgaagccattcccaaataccctccaatccaatactgcaatcaccccagggtggtttagctgacccatttctcccaaatacacccataagcctctataggggatcttcattgtatttctctagctagattgcaaacttcacagacaggaaagagctcttcacccaggtgaacactcggcatccagaataatgccgcctgacatacctcagtaactactgctcaaattggaccaagcagtctatgttgttctattaattccctctgctgctcaaggaacttaagttttttgaagcacattatttaaactacaccctagtgatgtattatcccaaaatattaatgtgattgcttcttggttaggctaacttgtttgaagagggtggaggaagaacttcaagagttctactccatgtagtatctcaagaattgggctgacagagccatgacattgtacaataggacatacttcaagtcactgcaatagggaaagaaaaagatgagatggtatagggatttctcactgcttttacttggaagtgtctcagcactttgtggctattccactggaatgtgctaataagcaggatgtatggaaactctcaagggatggaaatatggggtgccacagactgtttggagatctgcacagtgtaccatgtgcacctcacacttcccagcacaccccacagctttgaagtagtttactccatagagtctaaactcccccaggactggatgcacctcttttgctcaataacattccaagtacctgttattcacagcagagtgatgaataaaaagctaagaaacaaatcatcaaaaataatgaacctttttaattgtttaaaggaaaaatattctccacaggaaggtatttctagtcttatgtccattggtagccaaacggaacttcataaaaaaacacttccacaactccaactttggtttaatgtacaactttgatatatcttattaatgaacacatcaagaggctactgacaaattcgttaatattcaagatcatccaagattaacattttattacaatgaactgcagaatcccagtgagaaaattttgcttgaaccaaatttctattctagcacttacaaaactaactctcccatacacaccccacaaacacacacacacacaaatgtgcacgcctgcaaactcagtagagaatgggggtaatttaatggagacagaaataggtactaagatggtatttctaagtgtatgagtatcatttagacaactgcacaaaacagacaatctcaaaggcatacatgacagccagtaagtgaatacatttaaacatgaagcattttaccataagctgaaacacacgccttgctctagtctacataaatctaatcattgtgacagaggagatcccacacaataagacataagttatttttaatcttaaaaaaaaaacaaaaaatataaatccttgttaaacacttcattaaaaatatgcagctttattttaaaatgcagtatgctcaaaaatggcagttaatgtctcccatatacgtaagtatcttaagataacacattttcttataaattataaaatgctttcagcaaaatgtttcatgaaaattctcaaatgactgtcagaatttgttataagcccacaatactaaacactcagagctaaacggtagtgatttgtgaacaattaagagtctcatgtgaggcgagtcacaggcgcacacatatcgacagctgggtgataataaatcagtagtagttcttgcttttacttagggggcagggttagatacaaatttgctctaaaccgaacaaccatttgcaaactacaagaggaatagagtaaaaggtcactgtcaccgctcatgcagtgcttcacacaccctactttgaaattgttcttgaagagaaatgtccacattaagcttactctgctaaaccaatgtaactgagcttacttattcgccatcctcacgccaacaataaacattcaggtagactcacagaactggaaaggtctctataatgcacatattccatacctgctgtactaaaaatgacccaatcagtgtccatgtcctaaaattaagctaagaagctttggagacatacacagtacaaaattaggtttaaaaaagtacatgagtaaacaaaaaaaaaaatgattgtttagtcgctaaaacatacttaataacatggggtatgcctccaaaggcaagggacttgtcatgatcttatgtagggaaagaattctcagaacagctaaattaggagctagaggactgttattgatgacattatcctgctgtcttcactttctaagtgtacccacccacatcctaatacctgttcaaagatgggaaaacagccaaactataaccataaaaacgtgttctaacattaaaaggaactataccagtaggcttcctgttgcaatgtaattccataggaaaatcagccttttaaggctcctactttaaaagtgttccattgacctgagggtgggatttaaggtactgttcaaccgcaccagactggactgggcactattgtttccattcagcaacgtttctctctgccctcgaaatagcactgttaaacaaaaactacccacaagccatttaagactctacttttgatgtgtcttagaagtaggttagctggacttatgggtcttgatttttggggagcctttcagaagcctgcatgttacactggtgatttttaaattctcaatggaaatggtgatggcattcactgaaccaagtcagctcaaattacagtagaatggaatggacatgatctaaaagcaaagtgccaagaaactccggttttcaaacatctcatgagtcaaaatacttttatattcaagttttagcccatatacactacctaagaattctaaagaaaaatgtgtgaatcttcaaatttctttttatagttatatcactcaatttactttctaaaaaaggtcacagagaaactataaactttaggtaaccctaaaatttttcagagtgatgtggtctgcttactttcaaaacatctgtacaaactacattgttacacattatcttactgttgaaaggatatgccttactctttaacctttaaggatatcagaaacaagatcctatttgagcccactattctgaacatccatcttcacatgggacgagtcctgatgaagccgaccatgtgctgatggccaactgcagaaagccacagaacagaacagaacagaacagacctgagacatcaagcccatgggggtggggggcgggggctatctttagacatctggctttattaaaaaaaaaaaaaaaaaaaacaccattttccaaaaaccttcaacttcttcaagattaaaatattccttactgtgcctggaacaatttatgacgtgatgactaactaaggctcaaagagcttctcttaaccatgagtagacagatacaaatctactccggagctgacaaaaaccatgcttttctaatagtcggctttgaagaatatctaggaggaaaaaaaaaatatgaaaaaacctacagtaactttgtagtcatatttggctgcccattactggacatttcaatgggtttaaccaatttgaattataaatactctcatttaataaaacagccacacaatgacaagaatgagactttaatcagttttaagtggagtttataacactaagataaagggttgttaacaaacacagtaacaaatggacatctgattggcatgaggcattatcctgtacacgtcatacttgtgtatcctcagtgcatagcatttacacacagagccactgctgcacagcacaagagtatctgaagaggctgaaccagagtaaggctgttttacagactcaattgttttagtatatatatatatatatatatatatatatatatatatatattctatatgaaaacagattgaacttttgaactggcaggtagaaggcaactctgccaaatactacagtaaaagcccccggtttagtgcacagttccaccccttccatctgcatgcatgacacattaacagtatttaaaggtaaacgaggcactttgtggcaaccacagccatcgttatgaacatattgcacaaattttctagaactaaacatgtaacttgtaacctacttttatttttaaagctgaaacatttgatgctgccggtaaactccacttaagtttataacctgtgccacagcaaagaatggtgatgctatttaattcaactacccttttacaattatggcaaaaatgtccaagaagaattacagaggacttgggatggtacagggcccagctgtaagccttcttaaaaggtgatgccttcaagtcatttcagacacataagctgctgcacatccaaaaagtctaagaaagcattccagaaacacgggagagattacctacagaatgcatttcaggctaatcgtgaatactgtcataaataaagttttaattaggactcaaaaacctttcagtcatagcaattcttgtcaaattctatggggatggtaactgaaataaagtaaggagagtatgtataatatatatttatatatataatatatatatatatataatgccatttttccatttccaatgactacaccataaaatgtaagcaaggcttctcaaaaacactgaaacattcaaaatcaaaaccctcattcagaccttcacattccaaaggaaaaatattaacagtgcaacagcccattgtaatgtcattattcatgacctggccctctgtgttacatattggaacaatacaagttatagtttagcatgctgtgcccaaaactaacaaagaacagtgttcatcactatctccaaaacaccaatagctgcttctcattttagtcaaccactttcagcttttaggaaagacaaggtggtatacaaatttcaatggtgagatcttaggaaaagttgtctctaactttatcactttatcaacagtcgatcaatattcatgtatcaatgtttaaatataaatgtgtaaatcctaagagcttagttacaattttaaaaattttattggttgagtgaaactgatgaggtatggaaaatacaccaacattattttctaagaatattttagatgatgttctgcctaatctacttaccatcaaactataaatgcttctctggtgggtcctacgcaatctgtacttgttaattaactaggtcagaccacagctagtgaacaatttcagcaccaataagttattgaaaatgggacttcacaccattaagaaatataatggctggatattcaaatgtcaaggtcaaggtctaatttgaaagacaccaaattcccaggaaaaaagaatcctctttaatagtatcttcacattaccattacaatagtagttgtactcgagctttaaattgtatgcagtctgggcatatccaacatataatgatatttaagcagtaaaattgaagccctaatcccaactctaccactataaagaagtgactcaacactgcacattaaaaaagatctactctttcaatagcaagtcgataaagcatctgtaggacaatttctactgaaaaacttaaatgccttattattcgtgcagtgctgaaaatttactgcaactctaatttccttttttaacacaaacaatgacttttttaatatacacattatatgtattcagtattcaagtaaaattccctaacagttaatgacatttaaaaaatgtgcaaaactgcaaaactcattgtaatagaatgtgtaaggtcaaaagggtggggcatctgacagctactggactaagtgcatcatccatctctacagaaaaaaaccgcttactgatgaatctcaaattgtaatttcctgtgaagaattacacaatgttttctatttaacgagaaaaagaaactggcagccagcacatgaagcatccacagtgggtatatgattgaaaattaatgaaaatagatgtaagttgttgactgatgtaggtactaatagcatctgacttttagcactggccttgattacagaggagatggagcagtcattacaactgagaaagcatactgaataaatcattgtcaatttttctgtttccagcccattctttgttgatagcctccacatttgtatggttaagtcatcgttgctgtgtctcttatccatgaccatgttatttttatatcccttcatttgtggattcttaagatgctgtagaaggttcattcctataccccaatacaaattgaatctctctagctgccttttctagcaccaataatgctcttaaaaatgcacaaacaacaagcagtgacagcggccaatttcttggatgtccagattagtaactgtagcatgctaaagaaaggtacatgtaagtagctggagatggtatatggtccagagcccagctaaaaatattcctttctgagcatcccctccattccctcaacccaagtacatgcattagaatttagcgaaaccctgtaagaaacatctcttagccaactgcaaacttatctgttgccacaagtgcaaaggggtaggtaggacgtgaacctgggagtcagagctcttcagccacttcagctggtgacagaaaagaaaaggaaaactcctacgtatacacatcagtctgtctccactttttataaaactggaataaaatgggaaagtgccatctttatttatcctaattgaattttaaatgtccttttgacacaaaaaggtatatacatgacacagctacacaagctttttcaactggacaacaagtgtcaaaccctgtggatgtatagggtaaaacaagattggtcaggaaaagagaattgttcctataactgcaatctgacacaatgtcctattgccatttaaaaaaaaaaaaaaaaaaaagtccatttcagtttattcaagtttttttttttcatggtattttatccctcttgataaaaaaaaatcagacttttgtaatttgtgaatgctgatcttcatcaaaaggttcattctctggatcagagtcagtggtgtcagagtatctataatgatcaggttcattgtcactaacatctggtgtcacagaagttgaactgctagcctctggatttgatggctcctctactgtttttgtaaagtataatttcacctagagaaagaaagtttaagatgagaatgaacagttacaatgagttttacattagcaaaggcatttacttccacagattcactttgaaagtactgtaacaaacatgaatttgaaaagtactgcttttcaaatgaccatgagattgcctactgtgcactgacacgtcaattactatttttaaagaagcataagctatataattctataaaagaaatgcaaaatgaaggcaatgatctcaggaactcactacatatgcttttcaatcacaaaaatcaatttacaaatccttaagtttctaagacatttctgttttatctctatctgagaccattttttttattagtagtactatacaaacactgattgataataatgtgttcaagatctattagccctaaaaccctcacctaaatagagaatggaggacgctaacaatggtctaaagagtgggtcaagagtctttccatgtgtgcatggccacagtaaaactcacttagtatttccattttaaaggaaaaggaacaaagacccagaagcctaggcaccatgttaaaggacaatacctggtgaattggaggctggatttaaacaggatctttatctatagcttctcataaccaacatttgctttaagttcccccttcaaagtattttgctaattttaccacccctccctgccattactttagaccatgcaaacactacctcttgtacgcaggaacttgctgccagtgggctccctttcccactcattccccttcctccatccgcaacctctccctagtttcctagccagtctcaatgtaagggagtaaacggaatgtttaaagacaaactgagattataccttttctatactaaacactccacattgtcatatcaagactggttctcttgtggctttcagtggaactgacttcggccactcaaatatatcaagctcattgctgcctcagggttctggcatctactcttcctttttctaaacagctgctagtttgcccatttcattcagacctctgtttgcatatcatccatttgaccaggccatcttctgcatgttccatagttcttaccttgatatatttgttcagttacaatgaaaatagcttttatagacaataactttttctttttatactgtattttagtgattgtttttgtaggacttggtgttgaactcgggtcatcacccatgttaggcaagcactcaggtacattgccagagaaatattaacagcaaaactagagagaaatacacttaaaagcaagtggttgccaagtgaggcaggaggaatgccagttcctatatagcaagactctacctaaaaaaccagaaaacagaaaaacagttgagagaaatataaacttatagaaaagaaaggaaattaaaacttgaggatcctctaggaaacttaaaacaaccttgagatccaaaagcactgaatagtagtgctattttcccttaacacatataattgtctacctctattttaagtattaggagtattattatgctcgtaatctatgtttaagtttgttacatgtgaatgaaacaaatacaacagaattaagaaaggaaaaaggaaaggctgaagaggaggagggagaggaaaagaaagaggagaaggaacacgagccagtagaggaataaatagaaaaaggaaaggctaggcaaccacttaggaatgttacaaactgaagggtactaacataggtttagttttaaatgagtgaagccaagttcttcagctacacacttagaataaaacacacattcccaccccaaaaatggttttaactgaccttaaaattgggagaaaagtatcggttggccttgtctttgtttgctttgtccagatcattttttgttaaggtaagaactagatattctttgtcattatctgcacgttctatactgcaaatactgtcaatttcctgatcacagagacttccattctccactttttctgatgtttcctctggtcctggtatgaagaatgtatttacccaaaagtgaaacattttgtcctaaaaaagaaagatgtattttactcatttaaaatattttacaaatagccaacataataaatcatgtacaatctggtattctaagtgaaggcaaacaactcatagaatgtcaacattcttattaactaagttatcttttattcaaatttcagataaaaatataatcttttatgttaagattctaagtaaagtattttctattctaataccagattttaaaaatgttttgaatttacatgtatgtagacataagaaaagttcaggtgttttacttcaatagaaaacctaggaaggttagtaaaagctccctaaggaaatatggcaactatattttgcctggagatatgtatgtatgtacatcctgtgaatgcctggaagccacagaggccagaaagcaattcagatcccctgggactggagttacagatgattgtaagccaacatgagagtgctgggaatcaaacctgggtcctctggaagaaccaccagtgctcctaaatgctgagccatctctccagcccatgacaagtcttttcaaaatcttactgatctcagttacttcagcaaagttgttaacttagcaactatactttgcttttaaaaaaaaaggggggggggtattatttaaactcccaaaatgtagcttgttgatgtgtgctaattttctgaaactttttttatttaaatcagaacaggcacttaactaagtcaggaaaagctatgataaatgcaaatttacataaagtaatctaagatatacaaatataaatatccaatcttcagtttcatgtatataaatgtgcaattgagatctggaggaagaaacagcacattcctaaaagtacaaggagtgagtgagttatctattttaaaaaacaatataaagccaagtatggtggttcatgcctataatcacaggacttaggaagtcaacgctaaaggactgcttcatctgaggccaacctgggctacttagtgagtttgggccagttcgggccagcctgagctacaaagtgagaacctgtctcccaacaatcaaacactaacaaagaaaatcaggaataaaaatttgcatgcacaagtacacacacacacacacacacacacacagcacacacacacacacacacacacacacacacacacacacacacacacacacacacactcaattttatatgaaccttgagtcttctaggaggtaggaggaaaaaccagagccttctaaatacctgacgtttgaaatactactggctcatacttagctttttttttttctttcttagaggtagaaaattgagtctatgatagaaatagtaatttgtgatcttgtttacttacttttaactacttagatcctatttaacatttaaaagttttataataagtgaaatttccttttatcacttttttaaaaatctaaaaattgagaaaacgaaatcctctttctggtgatataaaatctttcatgttttacaggtgtcagtcaattctaaacaaagttggtgtctttctctgaaacatgtgcaccttagactctttgaaatatttgcaacattccagattaaggttattacagccttctcttaagtgtgtctcaagccttagtattctgaactcacatgttcaagtatatttttttttcactttgtttgcttttgttttctctgtgtcacagtcctggctattctagaagtcactttgtagaccaggctggcctcgaacgcacagaaatccacctgcctctggctcccgagtgctgggattaaaggcgtgtgccaccaacacctggctctttttttttttttttaaatcacttctccatagctggttctttcaactaaataatactgactaaactctcagcaaatcttgggaaacaaaatgtaaaatagcccagtctcaagaaacataaacccaactgggtaaaatgaggcttgtgtcatttgtaagatcacagaacaaaacaaaacaaataaaacaaaaacaaaaatccacaaaggctctgctttcatgttccatcaatgtcacagatgaggcaaggtgtgtgcaaacctaacaagaaatccatcaaaactcggtgggcggcaaagaaatactgtatctcaatctccttaagaaaaaggtctgaggttactcatggcacagctatttctaccagatagaactcaagtgcaaacctttttgagcatcttgttctgcttgtggaagaactctactttgatgtcaccacacacaggcaatggctgaggaaactcaaagtacatgaacttgtcttcccgtcgtgtgggtcctgaattggaggaatatatcttcacctttagctggcagaccacaaactgaggatctacatggttaaatacatacatgatcatttcacaggaaatgcctttaacattcaaattatcagaaactattttaatgacaaagtaatggaagtaaacataaaataattcttcatacagactgctgatctaaaacaaatcaatagaaataaactggtttaaaacataaccactcattccaagtagcgatcactcctctttgaaaccttatgtaaaggaatgcaaggaaaatcaattactacttcataaacagtaagttcacagagatccacctgcctctgcttcccaggtgctaggaataaaggtatgtgctgccactctcttgcattttatttctaaaatgtactcaaattcatttacagctagaaagaaacaggacactaatatgttcaaattagaggacttatgtgacagaaaaatatcaatactagccaggcggtagtagcacatgactttaatcccagttctaggccagcctagtctactaaactagttccaggatagccagaattgttacactgagaaaccctgtctcaaaaactcatttttaaaaaaaaaaaaaaaaaaaaaggtattatttctttcaagatgaggaatttttaatctattatgaccaatgactgagaaaatgtgaaagttaaaccaatctaagtgaaatttctaaattattctaaattaataaatatatagaggtctatgtattcaacatataaaaccagtaacgcaacaatcatatcatagaaaacgggacccttaacaaagcacgtgggcttatcctaacatggatttacaagacatttatcatgaaatccacccaaaagagaggaacattacaccaataatctgccaaacatttcacttctttgactaaaggttcaaagtgcaataagacatttgcaaagctccatacaataacgaagttaacatgaaacaaatgaacaaagcatggtttcaatgttgtggtaaaaattattggaataaaatgccttataatcttattaaggaactattattctactagttcagaatcagatactacaggttttaggatttgaaaactgatggtataatctggatttcaactaaacagcatccaaggtataaatctccaactgtcataataaacaatcgacaagttaattacaaatccatattacttagaacttcccctaaaaataagataaaaaatgtttcactaattatatttgtctttctgggtctgggttatgtcactcaggatggctttttctagttccggcaatctagtttttctagttgcctgcaaatttcaagatgtcatagatttttctacgttgagtagtactccattgtgtaaatgtaccacacaaatatagtatgtactcactcataagtagatattagacatgaaggaaaggacaaccagccaggcaacaaagaggaccctaagagagagacacatggatccgtctaggaaggggaaaaagacaagatctcctgattggagagcccccccccccccaaggagtagggtggaagggaagaggggaagcgggaagggggagtgtggggggtgcaaaaaagaagaaaaaagaatctaattgagaaaaacattaataaaacagaaaaaaatgtttcactaaaaataattagtctgaccatgctgcttgttggcggaacgtgaactttgggactttggattcagaaaacagttcaacactctatgcagagcttaattggccacactaataggaacatggaggaggctaggtagtggaatacctgcctagcacacaagactctgggctccccctctgccacttgtgcgtgcgtgcgtgagtgtgtgttttggggagctgttgagtgatttttaactgggtctctgtggtagtttgcataagaatggccccagaggcacatatatttaactgcttagtcatcagggagtggcactacttgagagggattagaaggtgtggccttgaagtaggtgtgaccttattggaggaagtatatcactggggatagactttgggtttcaaaagctcaagccaggcccagtgcctgctcttcctgatgcctgcagatctatacgtagaaccctcagctcctcctccagcaccaaatctgtctgcataccgccatgctggtaatgaactaaacctctgaaactgtaagcaatacccaattaaatgttttcttttttcagagttgctgtagtcatggtatcttttcacagaaatggaacactgactaagacagttcccttagttgccttgtacaataaaacagcataaagtttttttgagaaatgaatacacagaagcatttcctaaagccactgagaaaaataatctctggaatgagtttcacactgggatggaagtcctaaaatcaaaactctaatattattaaagttcttttgatttctaaggtacacatctgaaatataacctttgatatgttaactatgttctaaagaaatgtttcccaacaaatacatgggtcatcctaattaatacttataacccatacacaactttccttcacttagaaatagtaagacaaaattcaagtaagaaaactgctgccagctcctgataactgcagaaacactttttagttttcatcactagtttaatgtttcaccgatgctcctcttcttcctgaatccacctcactcttcccttttctcattctttaccctttcctaccttaacggcatactcagccaaaaggctaagttactatcttgttcctgatgtttctcccgaacaaatatgatctcccacctagacttgaacccactaagaatttaaccactaagcatctttttaaaaataaataaataaataaataaaaggtggggatggagtgcagggcattgtgctttctggttctactcaaatactgcacctgaaacaaagcctctagccccattacagagctttccataaacagcttgttttcattacatttaaaacaactttaaagccaaagtgataatacttatgtctccaaatttcaaatgtacttttcatctcctttctgtgaatcagccacctgagtaagatcagcaaaagaaaaaccaaacaaagcccatttcactgctccagcaaaatttggcaagtcacatagctggttttacttccccctcctatatcacaactttctatagagtatacaattgtccttaaaacatggcttaactccctaaaatcaacatgacacccatatttccagtctattatctctcactcaagatcctataacagctaaccacaccttcatttcttgtccagctcggtttccgtctgttgtactgcagttcaaccatttcctattgccagcaatatttccttcaaacgtaatgccaatctaaactgtacgtgttctccaaaggcagactttctctatgaaatagtttccaaaacctttcacaagcatagcatttataatttatgcatacaaacccccatgagttatattttaatacaacttcaatatacagtattaaatcccagcatataaatagggaactagaaaatttaaaagatgaaaaaaatttattagtcaataattttaagtccagagatgtgaatatattgtgagcccaaaagtcaagcaaaacagaattgaatcatagacaggcaaagtagagctgacaagaaacctcagtgagactcgggccagtgtaagcacctgctaagatccctgagcagagcttttccttactgcctctgcatcatctgtttggatcttatactgatacacagactataggaagcccatgagtttacatccttcttccttttctacaaatctgatgaggttcctaggtcaatcatgttcaatagttcattgtgcctttactcaagtttttaaaattatactgatatgatcagtgatgctccttagaactttctggcaagctatattaataaatctgggccctctgataaagttgtcacactcatggtaatcacatccatcagacaaagatagatgagttcaagaaattaattttctctgcataaattattttagagagaacaaataaatttacctaaataacttagcttacagctaaaaactaaaatcactaacaaattgcaaaacatctaatgagtgacatctatccgaaactacgacactgcattgtaaatacagataaaatatattcttaagtataaaatatgattgaccactcccaggtggcacttcatttgtcttcctcagatgaaggacttggttcctgtcccaagaccctgatccattgccactctcatgctggcctgtaagcatgtctttcagcttttaggtcagaacggagactgcagttggtggttgtaacacagaacatctctcccatacatataactacttcaagaacactcaaatttaccattcttagttttcttaggccaatgagctgaacaactgaactgatgaattctgacactttaattctaaatgtttacatacacattttgatacgttaacaaaagttttccaacacacagaaggatgagaatttcaagaacttactgcaagttccgccactgaacattggaatagtttcaaacatcatcttgtggaacaacagcgccactggtctgtagtccaggtggttctttaacaggtagctatagtaatacacatagcgtctctgactgggaatagttactccctggtggatgggaaaagacaaaagggaagtcaagtttaaaagaaataaacagggggaaaaaagtaagtcaaatttaaaagaaaaatttcattgaagttattgtactagattgctatgataactggattattcccaagtttctctatctaactcagtattagaattaatgaaaacaatagcaaaagaaaatatcagatattcttaaaatgtagtggttaaacgcctcatttattcaaagattaaatactgctctaatctatgaacccaataagcaaagaccaatgcatatccaaagtaagagctgatggcctctgtactgtcactgttttttatacccaaggttcctcacaaagtcggactccagcacaactcttcacaaacctgcttacctactttctaagcaaaagcatatcagagtcagcatgctagagaaatatcctgcctttatgcagaaaaagcagtagaaaatgagattctgaccttagagcccaacaaagaatatgcagcagaatgataaacaaatacaacaacctgttaggagatgtactaaataaagtgctatggaataatctttttgtacagtgttttgacgtatcttttgccaaggtgccttctgattggtttaataatcacagctggctgtccaatagctaggcaggattttcagggcagagagggtactgggacgatgaagggcagagttaaggagacgcagaggaagcatgactttaggtgaggtaacagacaagccatgagccacatggcagcatgtaagttaaaatagaaatgggttaatttaagttgtaagacccagttagtaacaatcctaagctatcaactgagcatttataatattagaactctgtgtggttatttgggagccggcaggtggtaccaatgaaagactccacctaccctaaagggcatccctgtgctatccagtccttgaagaaattaggaaagcaaaaaatatatggcttaaaaaaaaaatgaagttattgcaaatgtttaaaggacataatttcatatggtacttaaaggggaaacctaaccaggtatggtgccccacacctgtaatcaaaccacagaagaggctgaagcaggactgctgttaagttcaaaccatggctacacaattagttccaggccaggcagaagtagataaaatctacactcccctgcccccccccccacacacacatacacacatacacaggctgcaatgattaaatcagtaaggtgcttgccttataagcatgaaggacccaaaacccatgtacatatgtgcaagtgctttgcctacatatatatgtatgtgcaccgtaggtatgcctaatgctcacagaaaccagaaggcattggatcccgtggaactggagttacagatgattaagaaaaaccatatgggtgttgggaattgaacctaggtactcttcaagagcaacaagtgctctaaaccatctctccagccgaccccatatatatgcaccaggaaaccatgcatgtgcttataatctcagcactgggcaagtagagacaggcagatccctggatttataggcaggaaatctagccaccttggtgagttccagaccagagaccctgagactctgactgaacatgatgtatggcatcaaaaaaaaaaaaaaaacaggatggaaccagacgatcaaactcattcctagaggggggggggaggaggagaggagagagggagacaaagggaaagagagggagggggaagagagaggggaggaagagacagggaaagggagagagaagagaaagagggagagagggagagagggaggaaagagaggggagagagaggggaagagaggagagaaggcacacagagaaactttaaaagataaattttaaaagatctgacttttctttaaaaaaaaagatgactcacatatgtaacaatgcacccactaatgagtaatttttctactacacaatataatttatgaaaaaagcaacttagaaatataaggaaaatagtaaacatcaaaaataaacagcagctttggcatggcagtaaccatttgcaatttcagtacttgggtacaaccaatatcaaaagagttcaaggagagcctggtctatgtgaggaccagtctcaaccaacaaaaagaattattttaaaaattagtatttgatgttcataaaaaagtatttgtattattctttaatttaccgatggcatctaaacctctattgtgttaagaactctagataccaacattctctttgggtgaccagaaaatagaaaagctaaaacaatatataaaacaagtgtgcttgggggttggagagatggctcagaggttaaaagcactgactgcttttccagaggtcctgagttcaattcccagcaaccacatggtggctcacaaccatctgttataagatttggtgtgcagatatacatgaaagcagaatgttgtatacataataaataaaatcttaaaaaaaaaaaaacaagtgtgctgactggcaagtacaggagtatgggttatggttcccctcctctccctccgtctatctctttgctctatatgtgtatcaaaatggatataaccagccagaagtgatggcacacaactttagtctcagggctcaggtggcagaaactggtggatctgtgagttccatgacagccaggactacaaagagagaccctgtctcaaaaacaaaaataaacagaaaaatggatataaacctgaaatcatgattagctatttaagattttggacagagagaaaaaaatcacacactcagtaaccaaaacttatatttaaattctgataatcaaaatacaaaatttcaatttgtttctttaggaaaatgagaacaataaaatgtaccttcttaatagaatgctaatgaggataaaacagtaagtgcagttacacaaaagatattaaaaatacaaaataatgtacaactactaagtaacagctatggaaacatagttgtgcaaatgcaggaagaggtggaattttatttctctatattaagaaaatactgcagtgggttgtaaagtcacactaatttgaagaattgttacagaatatcagcactaaggagtatccttaagtttaaaaatggttaaacttaatgtaaactgcacatagagcaccttattcagcaactttgacacacaagctgccactgtcagtgatggagctaaaagacagcatagcaccaggcagtggtggtgcacatctttcatcccagcactcaggaggcagaggctggtggaactctgtgcgctcgaggccagcacagtctacagaatgagttccaggacagctagagctgttacacagaaaaaccctgcttcaaaaaacaagcaaacaaacaaaagatagcatagcaagtgagttagaagaaagagcagacaggaaggagatggatgaggatcattgctgttgctcctgctgcttgctgctgctgtttaacaacataaacttctaaaccatatgaatttatttctagtcaaaagattaaattaaaaaaatttaagctgtataaagcatacaagtagaacatgcctgtaattctagctattgtgaagtggaggcattctgggtcaaagttaatccccaggccacataatgagacccccatcacaaaaactctaaaataaaattaattaaaagagactaaacgaaagtcactaagactgggttgtcaagttagtagctgatgaggttcagatatttttctcttggcctctatttttggtacacatttgtgcacagtaataaatggttctcaacattttaggtttccccaggtgatgggtagaatgtgattaacacagcatttatatgcttagtccttttgaaaagagctgtggacaagtaaataatacatagatcaagtgcagtgtgtggccagagctggcccactgctgagaggcagtgaggatgcacagagtgaagccctgcaccatgcaaaggcctttaggcagcaaggagaggctgaagctccatgtaccagcttgggttttaattacctggctaaacacaagcacacataggaagacaacattaaatccattttacagtattcatctttgaatctcacatctattcagctaccaaaacccagatttgaccctaaagaccactcaaaacactagctctgattttctacagtgttttgatgagtaatccaaatagtttgccgtgtccccgtttcattcatttatactttcatcttctttttctactgcttaataatcttaatgtgactatctttcttcaatggctaaaaaattaagatggtttcacatttccataaggacttgaattaaactttaaactgcagttctatttaggtgtcatcaagaatgaggtaatctgttctgaggaggacttgaaattagtctaatgagttattaatctaagtgagtggacactaggaagtgtttatgtgctaattttattactttcttcactatatgcatatcttgctttgtacttccctcagagaatatttaagatttctaacattattccattttcttattttaaggtgcgacatgatctacagaatctttgagacaagggtgaagcagatcattccaagccaccgttctttccttacgtggagttttctttcagaagctatcattctctctctggtttcaaagtgccgggccctgttctttgattcagatatacgggccaataagagggttccaacccctggcaagaacatttggttcaaagggaggtacatgctgaagtagttagaatgcaagccaaaggtactgggaccacaactgaccactacttgaaaacttcctgaaataaatataggcaagaaagaaaaaaaggagaggaaagaagagatccctaacatctgctgagcatttagatccagacctgagcttacaggttgtattagtcaataaacgtctccttctgtataggcttactttgcgctgagtttctctgacctgaaactagaaactatttttttaaggcattattttctatttcagcaatcaaaaagaaaaagaaaaaaaaataacttagtacagcagggagattttgagtacgacaaagagaaactgcgacttagggcagcttgatcttttactttgaattaaataacgacttaaatctatcaaagcataaaattgcacaactttatgaatgtatggaccggataataggctaaaatagtaggcatcgcaagagaacactctatcccatggacagttgatgccacaggaaattcaattacactaagaattttttttgtttactgtggtttaaaataaagaataatcaagaaaatttcatgaggttatgacatgggggaatttaataaatgaaacagaaaaaaactgttaataggttatagaaccattcctcagagaataatgaaaacccttgatgataaagttagcattattattttataaacttgacaagctgaggtactgaggtcatcacacacacatacacaacacactttcgcacacaaacacaaaacacacactttcgcacacacctttccaacaaccaatttggaagtaaagaaaaagaagactgaaatcttttcagtttttttccttaaaactttaataagagaaaataaaattaatgcttattttacttatcattattcaaggacaagggagagagcagtgactctaaataaagttattaacagtgtctttaatgcagaagtttgggaaatcattccaaaatatgcactcatcagcattcttaagagttctccctctttctttgccagtttacataatgtaaactatgtattgcagtactgaacccgaagtgcattgaccaacagcaaagaacaaacgggaaccaatctcaggaggtgacttacagcatggagggaagagtaccccagaaggtgacttacaacacaggggggggggaccctcgtgactttgcatatggacaatttgtcacactttcataaagtatcaactatacaagtaaataatttccagggaaatagaataacatgcttgttttgctttactgaatagaagacatgagtctttgttctcttcggtagttatctcactcttggaacatttttcttcataggaagtccaactattggacttctctgcaggattgaaaacataaagcactgtttggacattaagaacacaatgctacattttatgattagcttgtatatccaatctgcatcatgttgatatgtcaaggcctggtcatagtattttgagaagctatgcaaagtccacaaatttttcacaacatgccaaatgccccctcctttaaaataagaagaaatagaagattctgcaccagaacttaatttgcttcagcttcttatggtccgtagttaagaatataagcaaaataataaagacaattctagtaaaattcattacataaaactacaaaacagatgttaaaactattcacttccagttgtttacaattacccaagtgcaaatccacagacccaacctgaatgacaagaagggggaaacatatgacttagctagtgtacaaaatgttagctattatcatggcattcgcaagcaaaattccattaggtagtgccacatgttttaagaaagaaatcactctgagtaatcaattatatttattagaaggtagtactcacttctcaggaagaatttctcagttgtattaaaacagctataccatactcagctaagttttcttgtaatgaaaacaagttaaaacgtatccatcatttcactaccgcgctgacccttagataaatgagtgataccttttaaggtttactttactatttattttttgttaataatgtatcccattatggcatttccacacataggaatcactgcacttcctattgattcatctccctcccccaaatagctccttctgcatttatgtcctatagctgcctttcccctgtccatcttcccttgagattgctttctcccacaaaggtctcctttctagcttgatgacgcacacacacacacacacagacacacacagacacacccctccaagctaggttcttcacattgagaggaaaacaagtatttctgatgaggtttgttttgcttaaaataataacttccagtccagtccacccttttcctataaatgtcatgatttcctttttctctacatttaaaagctttacaaaaattgtaaaaactgtgaggaaatatacagcattatatttacagtaagcacaatctcatcctgttctccttatgatcatttttaaagaaagacaagactgaggaacctttcaacaaccatcagcattactgaacttttaggagtctggaaagaagtaacagcctcaaagttccttctgcagctcagaatttgcaaacgatattctaaaaagaaactgaacaacatggcaagggacttgcttatactctaaatgctgtcatgaactgtgtaattctgatcacaacagttcactgttctgggccttcacatcatctataaagaagcattcctgaggtagggatagcttaaggctttttatctgtatctggctttctaaagcaggtgcagcttcaaatgcaaataaaccatttagcaaaacagactggtcaacagcagctgttcataaattctttttctctaaataaatgaaagaataaagataggaaatgtgtagaatttttaaaaatccgtgtataatttatccaaaacactgtctaggtatattaattatacatcagctaagtacagtaaatcctactgatgtgactgtaggatgctaaattacttaaggagtctccctataaagcaatagctaaacatcagatgtaccaaccacatctctaacaatgtgggctgctctatttacattagaccatcatcttcactcaggggaaatggtaagagaatggagagtgcctgcggcccagaacagttatactaaggacacaagtatcacattttgctaaaagacactcaaggcctcacatttcactctcacaaatacttccctagctgtcttttcactctggcccactctgcaatattccccaagacttcttgtcacttccacaaacaccctttcctcccctgtagagagaaacaaactattgttaccaggttgtaataaatacagtgtctttgcactggcagattaacatggcctcactttctgacctggactcctgcacctaaccatcctgaactcctggacctgacctggactcctgcacccaacctggatcctgcacctgacctggactgaaaacagaaaatttacaggaaagttccaagtacccttgaattttactcttatccttgaacatgagacagactttcccaagtggttttcatatcgcaacatctcaccattctctcagacagatgacaattctgaagaagtgaagggaggaaacacaggatgggtgacagcagaacttaaaaagcctagacaactccaaacccggtatttgtcccaagtgaaagtctttgtctataccggccaaaacaaatgaaaaggtcatgtaataaaacatgaaagtaccaggtatctcagatacagtttaacaagggctgaggatatagcttagtgtgtgtccatgtataaggtcctaggctcaatcctcaccatcacaaaaggggagtgagagacaaaagaaaaaagtaaaatatatgaggctccctttaagaaagagaagccatgtctggtactagaaacgtagtcaactaatgggcagtggtggtgcacacatttaatcccagaacttgggaggcagaggcagaggcagaggcaggtggatctctgaattcgtggccagtgtgatctacagagtgagttccaggatagccaggcctacaaagaggaaaccctatctggaaaggggggggggggtaatgggggaagagaaaacctagccaactatctgggacaccaaggaagccacggatcttggaaaagaacctacaaccactaatttactaaatcagtacaatccctaactatattctaaatatttatctttataccaatagataagtgtagtcttcacccctcatcaaggaaatttctctttccaacaggagaccactacagaaaaccataaccaatgaaaatgcagaattgtggagcctagtcccaattgagacatccataacacaactcctgcacctaaggctcggggaacattgctgaagaggggcagaaagattctaaaagccagaggaccagggactttgctgagagattgtatcttctaggaatgtcagaagctacacccataaagtctcatcaaggtaactgctcagtcatgggctgagcaaggaggacagcagacatattagcatggaagcggggctcaccaggcctcagccctagataaagatctactggcaactaaggagtgctgagagggcggaaacagtcttccccagggaagagcgcaattggttatccaataccaaacggtcagcactaataacatatccgacagttgtatttacatacatacaccatcatcatataatttgattataatctcaaaaacttgtattgaaaaaaatctcaatgtacaaaaaaaggtgaaataagaatggctaagaaaaaactgttcttgaagaaacctccatactcttaggcatgctatacctacaacacctctggttttcctgcactagtgaagcagatgatctctctgccatggccacgcactgctgcactgggcaacaagatcgcgtgaatcctaaaagagccttgtctactggtaatgaaaagttctccgactgataagcacgctctttaaatcatggcctatgtaacatctgtcatgaaaaatctacttctgtgaaagaatcaaattcatgacagccaagactttcaatcaacagactctcaagaggcttcgtcaagaaacaaagctcctcactgcacatggtccactgataccaaaaagccagacaacgctgtcagacagttcaacacttcaacctaacactaaaatggaccgcaatcttttcctgccacacagcatcaatcataatgaccttgaaagcaaagaaactaatacaacatgaacttacctagtctcagagattttatctcagcctactttaattggtcaaaaaatgtgatgctccatatttctttcatatgtgagataagagttttcagcatacaagatggagtcaaacaatggcaattcttcaacttgtgtttaaaaactgtgtaaaagcaaccctctcatatattccactactgagccgaaccaaaccatttacatacttgctgccctcaagtaatgctgactctttaaatggggacagtgagacatgggttgttagaagttctttatattgtttttaagtctgattgcaaataaaattgatcaccaaaaatttatgattacgtgtataccatgcacatgttaaatgtgagaacacttgcagatttcatcagagttttgaaagacgtatatcacagagttgaggagtctctagcttgaatctgggattctggctcatgatttttttgttgtatcaaaggtgtaattttgtgaactcacaccagtaaacattcctttgatgtccttaaacaaactgaaagcagttacaaagacagggtttgaaaacagggtgaaagagaagtagagggcccaggaccactgaaaccacagaacttagcataagaggtatgatcacctctatttatggtctaaagctgagctagataaaattagggcttaaaagaaagagtagaaagagaggaggaagggagggtagggaggggagagggagaaaggggaggaagggaagtggcaaaacgaatttaatactagaatcaattttcaaagttgtcttactccatgtacaacttgacattgcaaaatgatgttgtcatttacaaagtccacactccagaaccaggcaactggattacaaaaagattgcaaaataactcaatgtttaaataagtttaagtcttatgttaggccacattcactgctatcctgagctttccaatttatctggagtagtttaggcattgtctttggagaagaagaaatgcacaaaaattctttgtattaaacatttttcaacttactttccaaagaaatgggtcctctgaaaaaccattacaagattttgcttttgctttaaattgtactactgactaaaacatgtcactcatttccagcctttgttttctgaataaccaatgagtcgaatctttgattagttgactacattaataaatattcatatcagaaagtgtttttatttactatcaaattgaatatcatgctttactaggtaatggcattcaggctatcagcaaaatacaacttgttccatgcatgcctctgaaataccaggatttcaatttattaatatatgcttttattaaattaaaccttgattcccagtatagttagtgggtaatcttgctagtattattagaaaatatcaacatgagaaaaactaaatgaactgattacaaactttgaagtgttagcatattttggtaattgttaacacttcagaggccagtctcaactatatgcagagatcctatctcaacaaaacaaaaggattaaaaataggtattagctcatctcttaagcgtagagatacacacacacacacacacaaaaaaaaaaaaaaaaattctattggacaagaaaaataagagctggatacctagactgcacagcatagcagcaagagtcaacagcatataacattgtatgcttagcaactgccaagtagatctcaaatgttttcaggacagtaaaggaagaggacagccatgccaggggtaaggtatatactaagtggatatgactgttgtatgacaacgtacatttctcaaaacatcacacacaaactgttaagtagatcagacttttattttttagttacacctcaataaagcaagaggggggaaaacccgtttcctaataaattcttgggtccacgaagaggaaaataaaataagtgagacagcttacctttttgtctctggtccttacttccccatagaaatctagggcctcttgtgcctttaaaaatttgccccgatgcaataaatatgcacaaatcattacaccagtccgtccctttccagctttacagtggattgctgcaacatgattgtcatcttcacttagccattggtcaagatcttcacaaaagggcttgataagttctagctgtggtggattatggtcttcaaaaggatactgtgcaactgtcacaaaaatataacctcagtgtaagaaaagatagctcctaaattttgaatgaaaagtaggttaactctaaaactgttatatataaagttgatgatgcttaaaagaagactaactttcggggaaatttcaaatattgcttattaacctagttttttttaaatctttattaattcttaaatatattgatcagacaaggccataagtattgtgttccttactccacgaaggaggaatctgctacatgaagggaacacatcacagtatatcagtacagctgaatccaaatggatgtcacacaggcctcttgtcaagaagtagcttctaacagaaggagcaataacagatattactgcatcatcacaaaacatgatctgaagaaagaatagattattaatagagtcaactatggaaaagactggttttatatctcgtaataataccagacatcatcatcatcatcatggtttttcaagaaaggttacactgtgtagccctagctgccctggaactcactctgtagaccaggctgccctggaactcagggagatcctcctgcctcttgtctcccaagttttgggattaaaggcgtgagttaccacagcctggctaagagtcttatttttaaaatagtctcacaaatattatcattgtttatccatggcttgaaaggcatgtatgtgtatacatgtgtatatgtgtgtgtgtgtgtgtgtgtgtatatatgtgagtatatatatgtgagtgtatatatgtatatgtatatgtatatgtatatgtatatgtatatgtgtgtatatacacacacacacaaagatagatatataggtatatccccactaatttaaattactcacaaaaagcatacaactatagtaaagtttaccaaattaagttttagactgttttcacatgaattacggatgtctttgttccctatagtcaagagttgagcttcaggaaggtggttgttatttgcctagaagcaagacttctggcttttatcttactagtatctgtcttgatgctactctattgagatccttagatcctaaagaactcaagggatgtgactcagtttgcaaggtgcttgctcaacaaactaagccctgggttcatccctgctcggcataaacatacagctgaggatgaggtgaacatctgtattcccaacagtttggaggcaaaaacttcagggcatcagaagtttgaagtcaccctcagctacacaatgagttcaaggccactctgggacactgaaacactgccttaaaatttaataatcctgatggatactgttgttttagttatctgctatattatctaatatgcaaaagttgtgatatatcccaaccaagccatcctaaaatgggataggacagtctatttgatcctccttgtgaaaggggagctctctggttaacaatggcatgcagttacataggcggcaggctagctttcacttaatcatctgcctaactgtgatcccaatctcatttccccagtggcacacaagggagtctgttaaaatgtacatttaaaactaagtaacttcaactgtggcatgcttcctaataagcagtagcctacttctatcccacaaaagaaacattcctagtaaattgttctcatttagttcttcatgcttcagttctcagatcatcattaacacacatgctggatgataaacatcaatccatcgcttacagtacccatttctgtttgactaccaaggcagtctctgcaggctctgggacagaatggacccagctgctctatcccttcctcttttatgtcattcattattctacatagaacacttaaaatggttcttctgtcatcttataattgtttacaatggcaccgaagagtctataagcccctccttatcctagtttagtctagtgatctcccctggttctcaatctactctgtgatttacctttcctgacaaatttgataggtctatatgacctaaagaacaactctaaacttaaattcactttttaaaattgccaaaggccgttaggatttttatctcaataatctagataattaacactatatggtaaaaaaacagtctactggtcttaagttacataatatactatgtatggttatatttatacatacctctgcagttaaatttggcggtgtcataatgtctttcagcacatctacaagaaagtttaaatgtggcataaagttacctttcacacttggaaggcagagtattaatattaccaacattattcaccctttatacgacactatgttaagtgttcttgtattcactatttcagttaatttcaagaattctgaagtaagtactatttatcatcatcatcatcatcatcatcatcatcattattttataattaaggacaccaaagcttaataaaaaagattaaatgcattcatgcaatttatagagtagatatgcttgtccatacaatttgtgacatcaacatgcaacactatgaattcaactgcactgaccctgtaaatttcttggatgaaaactgtacatgcttttagaatgtgttttttattccacaaacacctgtgaatagctactttcaatattatttttacctgatagatgatttatacaatcttaaaccattatttaataaaacatacatggtaaaaccagtgaaaacataagaacaaagaaaacgtaaaagacaactgaatgatactaatttacttaacacaattcttactaaaaattgtaaacaagaccttttatccttttgcatacaaatgtcatttttgtcaatgatctctcagtgtacaaattttagtatcagacaataattaaataaataaagccaatcagaatagtaaaatgcttacaccattataaaacatacatattatcttttcagtaacactagtggttgctatgcaattgtctcactcaaaattaacaggctatgaaataaatattaataggctcaagggtctcctacaaattagtggggttagcagcatcctggtgactccaactaacaaaatgggacatttaagaattactaaaatagctgggcattggtggcgcatgcctttaatcccagcactactagggaggcaaaggcaggtggatttctgtgagttcgagaccagcctggtctacaagaggtagttccaggacagcctccaaagccacagagaaaccctgtctcaaaaaaaccaaaagaattactaaaataagctgggcatgttggtacaggttataatcccagcacttgggaaactctgtattgttaagagtttgggaaaattgtattgttaagattagtcttgaatcagatggtggtggcacatgcctctagcccaagcacttgggaggcagaggcagaggcaggggcaggggcaggggcaggggcagaggggcaggggcaggcagggcagagggcaggggcagagggacaggggcagagggcaggggcaggggcagaggggcagagggcagaggggcagaggggcagagggcagagagagggggcagaggggcagaggggcagagaggcagagaggcagagagcagagaggcagagaggcagagaggcagagaggcagaggcagaggcagccagatctctattagtttgacgccagcctggtctacagagcaagtgccaggacaggttccaaagctacacagagaaaccttgtctcaaaaaaccaaaggaaaaaaaattagtctttgctatacagtgagtcctagaccagcctgggtacagaacaagaagaccctgtctcaaaaaaccaagacaaaggaaattactaaaaacaaaagtatgttaaaacagttccattactccttaccccacaaacccaaatcccgaagttctaagtatgcaatctcagttctaatagaacccattctgaggctgctcaaaaacacacctgcagtaaagactagccaatccaccacatggttacttggtaacataaaggatatcatttaatatcatataaaaaacgcctatcatttttaaaaaaaatactgaaaatttctgcatattgaaatgtaacttatccaaaacttccaaataagcagctgtggacctgcattgtacatctgcaatctacacagctccccaaccttaaagtttcaaaaccaaattcacatgaagattgagcaaatcatacataaactacagtcaacttgtgtattatcctacaaaacaaaacaaaaaatcttttagtgtattacttaatattaagtgtattacttaatgtactgttttgctaaagaaagcatttattagataatggcgtatgtagccttgctaactaattttgtgtttatttctataaaaatgagacaggaagagaactgacacggacacaaaagagcacatttgtcctttctccctccttctttggtttttcggagtcaaaatcttatatacccaaggctggctttgaactcctcttcccttctccctccacctcccaagtgctagaattccatgcagcacagcctggttctactcttctgagagaaggaagcagtggtgaagatcctacagtggaatatagccaggaatcatggagactctcaggaactgaggagacaggaagctagctaggcacctaacctaagaaattggttgcatgacagcctaccagaatgcaaatgttagtttcccgaatagctagttgtctcaggacctgcaaaagcctggtctgaggtccagggtctgggagagttcttgcctagcagaagcaaagcagactataccccatcaaagaaaagaaagacagagcaaatactctcaaaatcctggtttaatgagcactgctgaagattaccatcacagatggttctcatgtatcagttaagatgacaatatggaagagggaaaagcacaactaaatgtctacaaaatataatacacaccttacactaacatccgtgttttcaccctcacaatcatgtaacagtttatatccctattatatagatgagaaagctaagatttagaaaggcccttagaagcttacctaaccacaccagcaatcacacatgacacatgagctcaagtttagtctcctcggtcaccaaaacccaacaacttttattactgtttgattcaacacaataaaaacactcaagttttaaataaatgttaaagcagtgacaaattttactcaaattaaagccagccctaacatggacagtatctgtcactgcagacagacccaagaattaaaactgtggaaagaaaaagaataaaaagcataaagctcttgacaaacatttagctgtgttatttttatctgttaagattttcttcgtgtgtgtgtggggggggggaggtgtgtgcacattttctatcccagcattcagtggggcagaagcaggtggatctctctgagtttgagaccagcctggtctgcagtgttagctgcaggacagccagagctgttacacagagaaaccttgtctcagaaaactgaaagagagagggaggaggggaggggagagaagggaggaggggagagagggagggagggagggagggattaaaacattcaatttgtaggtgttcaaacttttgaagtgaataaaacatggagaagtaaaatcaaagacctaacaaacaaaagggactgctggcataaaccgtgggtaacctatatgtacctatgtatccttggctacctcacttaacttccctagtcctggagaagttactactaagtgatctttcaggtcctttgccattttgaaaacctctatccaggtgacatgtgagtgagttaataggtactaaagggtattctcaaataataaagggatagttcattaaattgggaatcaaatgcttagaaacagagagtcaagttcctaagctacaacccaagg
